(19) United States
(12) Patent Application Publication
(10) Pub. No.: US 2022/0008557 A1
(43) Pub. Date: Jan. 13, 2022

(54) FUSOSOME COMPOSITIONS FOR CNS DELIVERY

(71) Applicant: FLAGSHIP PIONEERING INNOVATIONS V, INC., Cambridge, MA (US)

(72) Inventors: Geoffrey A. von Maltzahn, Somerville, MA (US); Jacob Rosenblum Rubens, Cambridge, MA (US); Jagesh Vijaykumar Shah, Lexington, MA (US); Albert Ruzo Matias, Brookline, MA (US); Ferdinando Pucci, Portland, OR (US); John Miles Milwid, Denver, CO (US); Michael Travis Mee, Montreal (CA); Neal Francis Gordon, Brookline, MA (US)

(21) Appl. No.: 17/293,842

(22) PCT Filed: Nov. 14, 2019
(86) PCT No.: PCT/US2019/061424

§ 371 Date: May 13, 2021

Related U.S. Application Data
(60) Provisional application No. 62/767,358, filed on Nov. 14, 2018.
(60) Provisional application No. 62/900,064, filed on Sep. 13, 2019.

(51) Int. Cl. A61K 48/00; A61K 9/127; A61K 38/17; A61K 38/16; A61K 38/44; A61K 38/50; A61K 38/48; A61K 38/47; A61K 38/46; A61K 38/45; A61P 25/28

(52) U.S. Cl. CPC A61K 48/0058; A61P 25/28; A61K 9/127; A61K 48/0066; A61K 38/1774; A61K 38/162; A61K 38/1709; A61K 38/446; A61K 38/50; A61K 38/44; A61K 38/482; A61K 38/47; A61K 38/465; A61K 38/45; A61K 38/177; A61K 48/0033

(57) ABSTRACT

The present disclosure provides, at least in part, methods and compositions for in vivo fusosome delivery. In some embodiments, the fusosome comprises a combination of elements that promote specificity for target cells, e.g., one or more of a fusogen, a positive target cell-specific regulatory element, and a non-target cell-specific regulatory element. In some embodiments, the fusosome comprises one or more modifications that decrease an immune response against the fusosome.

### CROSS-REFERENCE TO RELATED APPLICATIONS

[0001] This application claims priority to U.S. provisional applications: 62/767,358, filed Nov. 14, 2018, entitled “FUSOSOME COMPOSITIONS FOR CNS CELL DELIVERY”; and 62/900,064, filed Sep. 13, 2019, entitled “FUSOSOME COMPOSITIONS FOR CNS CELL DELIVERY”, the contents of which are incorporated by reference in their entirety for all purposes.

### INCORPORATION BY REFERENCE OF SEQUENCE LISTING

[0002] The present application is being filed along with a Sequence Listing in electronic format. The Sequence Listing is provided as a file entitled 186152003340SeqList.TXT, created Nov. 14, 2019, which is 819 kilobytes in size. The information in the electronic format of the Sequence Listing is incorporated by reference in its entirety.

### BACKGROUND

[0003] Complex biologics are promising therapeutic candidates for a variety of diseases. However, it is difficult to deliver large biologic agents into a cell because the plasma membrane acts as a barrier between the cell and the extracellular space. There is a need in the art for new methods of delivering complex biologics into cells in a subject.

### SUMMARY

[0004] The present disclosure provides, at least in part, fusosome methods and compositions for in vivo delivery. In some embodiments, the fusosome comprises a combination of elements that promote specificity for target cells, e.g., one or more of a fusogen, a positive target cell-specific regulatory element, and a non-target cell-specific regulatory element. In some embodiments, the fusosome comprises one or more modifications that decrease an immune response against the fusosome.

[0005] Enumerated Embodiments

[0006] 1. A fusosome comprising:
[0007] a) a lipid bilayer comprising a fusogen; and
[0008] b) a nucleic acid that comprises:
   [0009] (i) a payload gene encoding an exogenous agent, e.g. a payload gene encoding an exogenous agent of Table 5 or Table 6, optionally wherein the exogenous agent is set forth in any one of SEQ ID NOS: 134-154, a functional fragment thereof, or a functional variant thereof comprising an amino acid sequence having at least 70%, 75%, 80%, 85%, 90%, 95%, 96%, 97%, 98%, or 99%, identity to an amino acid sequence set forth in any one of SEQ ID NOS: 134-154; and
   [0010] (ii) a positive target cell-specific regulatory element (e.g., a target cell-specific promoter) operatively linked to the payload gene, wherein the positive target cell-specific regulatory element increases expression of the payload gene in a target cell relative to an otherwise similar fusosome lacking the positive target cell-specific regulatory element, wherein the target cell is a CNS cell.

[0011] 2. The fusosome of embodiment 1, wherein the nucleic acid further comprises a non-target cell-specific regulatory element (NTCSRE) (e.g., a non-target cell-specific miRNA recognition sequence), operatively linked to the payload gene, wherein the NTCSRE decreases expression of the payload gene in a non-target cell relative to an otherwise similar fusosome lacking the NTCSRE, optionally wherein the target cell is a first type of CNS cell and the non-target cell is a second, different type of CNS cell or a non-CNS cell, optionally wherein:

[0012] the target cell is a neuron and the non-target cell is a glial cell (e.g., an oligodendrocyte, an astrocyte, or a microglia cell), or

[0013] the target cell is a glial cell (e.g., an oligodendrocyte, an astrocyte, or a microglia cell) and the non-target cell is a neuron.

[0014] 3. A fusosome comprising:
[0015] a) a lipid bilayer comprising a fusogen; and
[0016] b) a nucleic acid that comprises:
   [0017] (i) a payload gene encoding an exogenous agent, e.g., an exogenous agent of Table 5 or Table 6, optionally wherein the exogenous agent is set forth in any one of SEQ ID NOS: 134-154, a functional fragment thereof, or a functional variant thereof comprising an amino acid sequence having at least 70%, 75%, 80%, 85%, 90%, 95%, 96%, 97%, 98%, or 99%, identity to an amino acid sequence set forth in any one of SEQ ID NOS: 134-154; and
   [0018] (ii) a promoter operatively linked to the payload gene, wherein the promoter is chosen from a SYN, NSE, CaMKII, aTubulin, PDGF, fSST, fNPY, GAD67, DLX5/6, VGLUT1, Dock10, ChAT, VAChT, Drd1a, TPH-2, GFAP, EAAT1, GS, CX3CR1, TMEM119, MBP, CNP, or CRFR2β promoter, e.g., according to a sequence of a promoter in Table 3, or a sequence having at least 70%, 75%, 80%, 85%, 90%, 95%, 96%, 97%, 98%, or 99% identity thereto.

[0019] 4. A fusosome comprising:
[0020] a) a lipid bilayer comprising a fusogen; and
[0021] b) a nucleic acid that comprises:
   [0022] (i) a payload gene encoding an exogenous agent, e.g. a payload gene encoding an exogenous agent of Table 5 or Table 6, optionally wherein the exogenous agent is set forth in any one of SEQ ID NOS: 134-154, a functional fragment thereof, or a functional variant thereof comprising an amino acid sequence having at least 70%, 75%, 80%, 85%, 90%, 95%, 96%, 97%, 98%, or 99%, identity to an amino acid sequence set forth in any one of SEQ ID NOS: 134-154; and
   [0023] (ii) a non-target cell-specific regulatory element (NTCSRE) (e.g., a non-target cell-specific miRNA recognition sequence), operatively linked to the payload gene, wherein the NTCSRE decreases expression of the payload gene in a non-target cell or tissue relative to an otherwise similar fusosome lacking the NTCSRE.

[0024] 5. A fusosome comprising:
[0025] a) a lipid bilayer comprising a fusogen; and
[0026] b) a nucleic acid that comprises:
   [0027] (i) a payload gene encoding an exogenous agent, e.g. a payload gene encoding an exogenous agent of Table 5 or Table 6, optionally wherein the exogenous agent is set forth in any one of SEQ ID NOS: 134-154, a functional fragment thereof, or a functional variant thereof comprising an amino acid sequence having at least 70%, 75%, 80%, 85%, 90%, 95%, 96%, 97%, 98%, or 99%, identity to an amino acid sequence set forth in any one of SEQ ID NOS: 134-154; and
   [0028] (ii) a negative target cell-specific regulatory element (negative TCSRE) (e.g., a tissue-specific miRNA recognition sequence), operatively linked to the payload gene, wherein the negative TCSRE decreases expression of the exogenous agent in a non-target cell or tissue relative to an otherwise similar nucleic acid lacking the negative TCSRE.

[0029] 6. The fusosome of either embodiment 4 or 5, wherein the nucleic acid further comprises a positive target cell-specific regulatory element (e.g., a target cell-specific promoter) operatively linked to the payload gene, wherein the positive target cell-specific regulatory element increases expression of the payload gene in a target cell relative to an otherwise similar fusosome lacking the positive target cell-specific regulatory element, wherein the target cell is a first type of CNS cell, optionally wherein the non-target cell is a second, different type of CNS cell or a non-CNS cell, optionally wherein:

[0030] the target cell is a neuron and the non-target cell is a glial cell (e.g., an oligodendrocyte, an astrocyte, or a microglia cell), or

[0031] the target cell is a glial cell (e.g., an oligodendrocyte, an astrocyte, or a microglia cell) and the non-target cell is a neuron.

[0032] 7. A fusosome comprising:
[0033] a) a lipid bilayer comprising a fusogen;
[0034] b) a nucleic acid that comprises a payload gene encoding an exogenous agent, e.g. a payload gene encoding an exogenous agent of Table 5 or Table 6, optionally wherein the exogenous agent is set forth in any one of SEQ ID NOS: 134-154, a functional fragment thereof, or a functional variant thereof comprising an amino acid sequence having at least 70%, 75%, 80%, 85%, 90%, 95%, 96%, 97%, 98%, or 99%, identity to an amino acid sequence set forth in any one of SEQ ID NOS: 134-154; and
[0035] c) one or both of:
   [0036] (i) a first exogenous or overexpressed immunosuppressive protein on the lipid bilayer; or
   [0037] (ii) a first immunostimulatory protein that is absent or present at reduced levels (e.g., reduced by at least 10%, 20%, 30%, 40%, 50%, 60%, 70%, 80%, or 90%) compared to a fusosome generated from an otherwise similar, unmodified source cell.

[0038] 8. The fusosome of any of the preceding embodiments, wherein one or more of:

[0039] i) the fusosome fuses at a higher rate with a target cell than with a non-target cell, e.g., by at least at least 1%, 2%, 3%, 4%, 5%, 10%, 20%, 30%, 40%, 50%, 60%, 70%, 80%, 90%, 2-fold, 3-fold, 4-fold, 5-fold, 10-fold, 20-fold, 50-fold, or 100-fold;

[0040] ii) the fusosome fuses at a higher rate with a target cell than with another fusosome, e.g., by at least 10%, 20%, 30%, 40%, 50%, 60%, 70%, 80%, or 90%, 2-fold, 3-fold, 4-fold, 5-fold, 10-fold, 20-fold, 50-fold, or 100-fold;

[0041] iii) the fusosome fuses with target cells at a rate such that an agent in the fusosome is delivered to at least 10%, 20%, 30%, 40%, 50%, 60%, 70%, 80%, or 90%, of target cells after 24, 48, or 72 hours;

[0042] iv) the fusosome delivers the nucleic acid, e.g., retroviral nucleic acid, to a target cell at a higher rate than to a non-target cell, e.g., by at least at least 1%, 2%, 3%, 4%, 5%, 10%, 20%, 30%, 40%, 50%, 60%, 70%, 80%, 90%, 2-fold, 3-fold, 4-fold, 5-fold, 10-fold, 20-fold, 50-fold, or 100-fold;

[0043] v) the fusosome delivers the nucleic acid, e.g., retroviral nucleic acid, to a target cell at a higher rate than to another fusosome, e.g., by at least 10%, 20%, 30%, 40%, 50%, 60%, 70%, 80%, or 90%, 2-fold, 3-fold, 4-fold, 5-fold, 10-fold, 20-fold, 50-fold, or 100-fold; or

[0044] vi) the fusosome delivers the nucleic acid, e.g., retroviral nucleic acid, to a target cell at a rate such that an agent in the fusosome is delivered to at least 10%, 20%, 30%, 40%, 50%, 60%, 70%, 80%, or 90%, of target cells after 24, 48, or 72 hours.

[0045] 9. The fusosome of any of the preceding embodiments, wherein one or more of (e.g., 2 or all 3 of) the following apply: the fusosome is a retroviral vector, the lipid bilayer is comprised by an envelope, e.g., a viral envelope, and the nucleic acid is a retroviral nucleic acid.

[0046] 10. The fusosome of any of the preceding embodiments, wherein the nucleic acid comprises one or more of (e.g., all of) the following nucleic acid sequences: 5′ LTR (e.g., comprising U5 and lacking a functional U3 domain), Psi packaging element (Psi), Central polypurine tract (cPPT) Promoter operatively linked to the payload gene, payload gene (optionally comprising an intron before the open reading frame), Poly A tail sequence, WPRE, and 3′ LTR (e.g., comprising U5 and lacking a functional U3).

[0047] 11. The fusosome of any of the preceding embodiments, which comprises one or more of (e.g., all of) a polymerase (e.g., a reverse transcriptase, e.g., pol or a portion thereof), an integrase (e.g., pol or a portion thereof, e.g., a functional or non-functional variant), a matrix protein (e.g., gag or a portion thereof), a capsid protein (e.g., gag or a portion thereof), a nucleocaspid protein (e.g., gag or a portion thereof), and a protease (e.g., pro).

[0048] 12. The fusosome of embodiment 7, which comprises (i) and (ii).

[0049] 13. The fusosome of any of embodiments 7-12, which further comprises a second exogenous or overexpressed immunosuppressive protein on the lipid bilayer.

[0050] 14. The fusosome of any of embodiments 7-13, which further comprises a second immunostimulatory protein that is absent or present at reduced levels (e.g., reduced by at least 10%, 20%, 30%, 40%, 50%, 60%, 70%, 80%, or 90%) compared to a fusosome generated from an otherwise similar, unmodified source cell.

[0051] 15. The fusosome of any of embodiments 7-14, wherein the nucleic acid, e.g., retroviral vector, further comprises a positive target cell-specific regulatory element (e.g., a target cell-specific promoter) operatively linked to the payload gene, wherein the positive target cell-specific regulatory element increases expression of the payload gene in a target cell relative to an otherwise similar fusosome lacking the positive target cell-specific regulatory element, wherein the target cell is a CNS cell.

[0052] 16. The fusosome of any of embodiments 7-15, wherein the nucleic acid, e.g., retroviral nucleic acid, further comprises a non-target cell-specific regulatory element (NTCSRE) (e.g., a non-target cell-specific miRNA recognition sequence), operatively linked to the payload gene, wherein the NTCSRE decreases expression of the payload gene in a non-target cell or tissue relative to an otherwise similar fusosome lacking the NTCSRE, optionally wherein the target cell is a first type of CNS cell and the non-target cell is a second, different type of CNS cell or a non-CNS cell, optionally wherein:

[0053] the target cell is a neuron and the non-target cell is a glial cell (e.g., an oligodendrocyte, an astrocyte, or a microglia cell), or

[0054] the target cell is a glial cell (e.g., an oligodendrocyte, an astrocyte, or a microglia cell) and the non-target cell is a neuron.

[0055] 17. The fusosome of any of embodiments 7-15, wherein the nucleic acid, e.g., retroviral nucleic acid, further comprises a negative target cell-specific regulatory element (negative TCSRE) (e.g., a tissue-specific miRNA recognition sequence), operatively linked to the payload gene, wherein the negative TCSRE decreases expression of the exogenous agent in a non-target cell or tissue relative to an otherwise similar nucleic acid, e.g., retroviral nucleic acid, lacking the negative TCSRE.

[0056] 18. The fusosome of any of embodiments 7-17, wherein, when administered to a subject (e.g., a human subject or a mouse), one or more of:

[0057] i) the fusosome does not produce a detectable antibody response (e.g., after a single administration or a plurality of administrations), or antibodies against the fusosome are present at a level of less than 10%, 5%, 4%, 3%, 2%, or 1% above a background level, e.g., by a FACS antibody detection assay, e.g., an assay of Example 13 or Example 14);

[0058] ii) the fusosome does not produce a detectable cellular immune response (e.g., T cell response, NK cell response, or macrophage response), or a cellular immune response against the fusosome is present at a level of less than 10%, 5%, 4%, 3%, 2%, or 1% above a background level, e.g., by a PBMC lysis assay (e.g., an assay of Example 5), by an NK cell lysis assay (e.g., an assay of Example 6), by a CD8 killer T cell lysis assay (e.g., an assay of Example 7), or by a macrophage phagocytosis assay (e.g., an assay of Example 8);

[0059] iii) the fusosome does not produce a detectable innate immune response, e.g., complement activation (e.g., after a single administration or a plurality of administrations), or the innate immune response against the fusosome is present at a level of less than 10%, 5%, 4%, 3%, 2%, or 1% above a background level, e.g., by a complement activity assay (e.g., an assay of Example 9);

[0060] iv) less than 10%, 5%, 4%, 3%, 2%, or 1% of fusosomes are inactivated by serum, e.g., by a serum inactivation assay, e.g., an assay of Example 11 or Example 12;

[0061] v) a target cell that has received the exogenous agent from the fusosome does not produce a detectable antibody response (e.g., after a single administration or a plurality of administrations), or antibodies against the target cell are present at a level of less than 10%, 5%, 4%, 3%, 2%, or 1% above a background level, e.g., by a FACS antibody detection assay, e.g., an assay of Example 15; or

[0062] vi) a target cell that has received the exogenous agent from the fusosome does not produce a detectable cellular immune response (e.g., T cell response, NK cell response, or macrophage response), or a cellular response against the target cell is present at a level of less than 10%, 5%, 4%, 3%, 2%, or 1% above a background level, e.g., by a macrophage phagocytosis assay (e.g., an assay of Example 16), by a PBMC lysis assay (e.g., an assay of Example 17), by an NK cell lysis assay (e.g., an assay of Example 18), or by a CD8 killer T cell lysis assay (e.g., an assay of Example 19).

[0063] 19. The fusosome of embodiment 18, wherein the background level is the corresponding level in the same subject prior to administration of the fusosome.

[0064] 20. The fusosome of any of embodiments 7-19, wherein the immunosuppressive protein (e.g., first immunosuppressive protein or second immunosuppressive protein) is a complement regulatory protein or CD47.

[0065] 21. The fusosome of any of embodiments 7-20, wherein the immunostimulatory protein (e.g., first immunostimulatory protein or second immunostimulatory protein) is an MHC I (e.g., HLA-A, HLA-B, HLA-C, HLA-E, or HLA-G) or MHC II (e.g., HLA-DP, HLA-DM, HLA-DOA, HLA-DOB, HLA-DQ, or HLA-DR) protein.

[0066] 22. The fusosome of any of the preceding embodiments, wherein the exogenous agent is chosen from: SYNE1, SETX, FMR1, SLC6A8, UBE3A, SOD1, TDP43, C9orf72, FXN, MECP2, ASPA, or ALDH7A1; or the exogenous agent is chosen from: TPP1, FUCA1, GALC, HEXA, HEXB, MANBA, ARSA, GNPTAB, or MCOLN1.

[0067] 23. The fusosome of any of the preceding embodiments, wherein the fusogen comprises VSV-G.

[0068] 24. The fusosome of any embodiments 1, 2, 6, 15, 22, or 23, wherein the positive target cell-specific regulatory element comprises a CNS cell-specific promoter, a CNS cell-specific enhancer, a CNS cell-specific splice site, a CNS cell-specific site extending half-life of an RNA or protein, a CNS cell-specific mRNA nuclear export promoting site, a CNS cell-specific translational enhancing site, or a CNS cell-specific post-translational modification site.

[0069] 25. The fusosome of any embodiments 1, 2, 6, 15, or 22-24, wherein the positive target cell-specific regulatory element comprises a CNS cell-specific promoter.

[0070] 26. The fusosome of embodiment 25, wherein the CNS cell-specific promoter comprises a motif of Table 3.

[0071] 27. The fusosome of embodiment 25 or 26, wherein the positive CNS cell-specific regulatory element comprises a promoter chosen from a SYN, NSE, CaMKII, aTubulin, PDGF, fSST, fNPY, GAD67, DLXS/6, VGLUT1, Dock10, ChAT, VAChT, Drd1a, TPH-2, GFAP, EAAT1, GS, CX3CR1, TMEM119, MBP, CNP, or CRFR2β promoter.

[0072] 28. The fusosome of any of embodiments 4-6, or 16-21, wherein the negative TCSRE or NTCSRE comprises a non-target cell-specific miRNA recognition sequence, non-target cell-specific protease recognition site, non-target cell-specific ubiquitin ligase site, non-target cell-specific transcriptional repression site, or non-target cell-specific epigenetic repression site.

[0073] 29. The fusosome of any of embodiments 4-6, 16-21, or 28, wherein the negative TCSRE or NTCSRE comprises a tissue-specific miRNA recognition sequence, tissue-specific protease recognition site, tissue-specific ubiquitin ligase site, tissue-specific transcriptional repression site, or tissue-specific epigenetic repression site.

[0074] 30. The fusosome of any of embodiments 4-6, 16-21, 28, or 29, wherein the negative TCSRE or NTCSRE comprises a non-target cell-specific miRNA recognition sequence, non-target cell-specific protease recognition site, non-target cell-specific ubiquitin ligase site, non-target cell-specific transcriptional repression site, or non-target cell-specific epigenetic repression site.

[0075] 31. The fusosome of any of embodiments 4-6, 16-21, or 28-30, wherein the negative TCSRE or NTCSRE comprises a non-target cell-specific miRNA recognition sequence bound by a miRNA of Table 4, e.g., by one or more of (e.g., two or more of) miR-338-3p, miR-9, miR-125b-5p, miR-342-3p, or miR-124 optionally wherein the miRNA is or comprises the sequence set forth in any one of SEQ ID NOS: 156-162.

[0076] 32. The fusosome of any of embodiments 28-31, wherein the negative TCSRE or NTCSRE is situated or encoded within a transcribed region (e.g., the transcribed region encoding the exogenous agent), e.g., such that an RNA produced by the transcribed region comprises the miRNA recognition sequence within a UTR or coding region.

[0077] 33. The fusosome of any of the preceding embodiments, wherein the nucleic acid, e.g., retroviral nucleic acid, comprises one or more insulator elements.

[0078] 34. The fusosome of embodiment 33, wherein the nucleic acid, e.g., retroviral nucleic acid, comprises two insulator elements, e.g., a first insulator element upstream of the payload gene and a second insulator element downstream of the payload gene, e.g., wherein the first insulator element and second insulator element comprise the same or different sequences.

[0079] 35. The fusosome of any of the preceding embodiments, which is not genotoxic or does not increase the rate of tumor formation in target cells.

[0080] 36. The fusosome of any of the preceding embodiments, wherein the nucleic acid, e.g., retroviral nucleic acid, is capable of integrating into the genome of a target cell.

[0081] 37. The fusosome of embodiment 36, wherein the nucleic acid, e.g., retroviral nucleic acid, is an integration-competent lentivirus or an integration-deficient lentivirus.

[0082] 38. The fusosome of any of the preceding embodiments, wherein the target cell is chosen from a CNS cell, a pan-neuronal cell, a GABAergic neuron, a Glutamatergic neuron, a Cholinergic neuron, a Dopaminergic neuron, a Serotonergic neuron, an astrocyte, a microglia, an oligodendrocytes, or a choroid plexus cell.

[0083] 39. The fusosome of any of embodiments 4-6 and 9-38, wherein one or more of:

[0084] i) less than 10%, 5%, 4%, 3%, 2%, or 1% of the exogenous agent detectably present in the subject is in non-target cells;

[0085] ii) at least 90%, 95%, 96%, 97%, 98%, or 99% of the cells of the subject that detectably comprise the exogenous agent, are target cells (e.g., cells of a single cell type);

[0086] iii) less than 1,000,000, 500,000, 200,000, 100,000, 50,000, 20,000, or 10,000 cells of the cells of the subject that detectably comprise the exogenous agent are non-target cells;

[0087] iv) average levels of the exogenous agent in all target cells in the subject are at least 100-fold, 200-fold, 500-fold, or 1,000-fold higher than average levels of the exogenous agent in all non-target cells in the subject; or

[0088] v) the exogenous agent is not detectable in any non-target cell in the subject.

[0089] 40. The fusosome of any of the preceding embodiments, wherein the nucleic acid, e.g., retroviral nucleic acid, encodes a positive TCSRE and/or a NTCSRE or negative TCSRE.

[0090] 41. The fusosome of any of the preceding embodiments, wherein the nucleic acid, e.g., retroviral nucleic acid, comprises the complement of a positive TCSRE and/or a NTCSRE or negative TCSRE.

[0091] 42. The fusosome of either embodiment 40 or 41, wherein the positive TCSRE comprises a target cell-specific promoter that is at least 10%, 25%, 50%, 75%, 100%, 150%, 200%, 250%, 300%, 400%, 500%, 750%, 1000% or more active in a target cell than a non-target cell.

[0092] 43. The fusosome of any of embodiments 40-42, wherein the negative TCSRE or NTCSRE comprises a miRNA recognition sequence that decreases gene expression by at least 10%, 25%, 50%, 75%, or 100% in a non-target cell compared to a target cell.

[0093] 44. The fusosome of any of the preceding embodiments, which does not deliver nucleic acid, e.g., retroviral nucleic acid, to a non-target cell, e.g., a neuron, a glial cell, an antigen presenting cell, an MHC class II+ cell, a professional antigen presenting cell, an atypical antigen presenting cell, a macrophage, a dendritic cell, a myeloid dendritic cell, a plasmacyteoid dendritic cell, a CD11c+ cell, a CD11b+ cell, a splenocyte, a B cell, a hepatocyte, a endothelial cell, or a non-cancerous cell.

[0094] 45. The fusosome of any of the preceding embodiments, wherein less than 10%, 5%, 2.5%, 1%, 0.5%, 0.1%, 0.01%, 0.001%, 0.0001%, 0.00001%, or 0.000001% of a non-target cell type (e.g., one or more of a neuron, a glial cell, an antigen presenting cell, an MHC class II+ cell, a professional antigen presenting cell, an atypical antigen presenting cell, a macrophage, a dendritic cell, a myeloid dendritic cell, a plasmacyteoid dendritic cell, a CD11c+ cell, a CD11b+ cell, a splenocyte, a B cell, a hepatocyte, a endothelial cell, or a non-cancerous cell) comprise the nucleic acid, e.g., retroviral nucleic acid, e.g., using quantitative PCR, e.g., using an assay of Example 1.

[0095] 46. The fusosome of any of the preceding embodiments, wherein the target cells comprise 0.00001-10, 0.0001-10, 0.001-10, 0.01-10, 0.1-10, 0.5-5, 1-4, 1-3, or 1-2 copies of the nucleic acid, e.g., retroviral nucleic acid, or a portion thereof, per host cell genome, e.g., wherein copy number of the nucleic acid, e.g., retroviral nucleic acid, is assessed after administration in vivo.

[0096] 47. The fusosome of any of the preceding embodiments, wherein:

[0097] less than 10%, 5%, 2.5%, 1%, 0.5%, 0.1%, 0.01% of the non-target cells (e.g., a neuron, a glial cell, an antigen presenting cell, an MHC class II+ cell, a professional antigen presenting cell, an atypical antigen presenting cell, a macrophage, a dendritic cell, a myeloid dendritic cell, a plasmacyteoid dendritic cell, a CD11c+ cell, a CD11b+ cell, a splenocyte, a B cell, a hepatocyte, a endothelial cell, or a non-cancerous cell) comprise the exogenous agent; or

[0098] the exogenous agent (e.g., protein) is not detectably present in a non-target cell, e.g., a neuron, a glial cell, an antigen presenting cell, an MHC class II+ cell, a professional antigen presenting cell, an atypical antigen presenting cell, a macrophage, a dendritic cell, a myeloid dendritic cell, a plasmacyteoid dendritic cell, a CD11c+ cell, a CD11b+ cell, a splenocyte, a B cell, a hepatocyte, a endothelial cell, or a non-cancerous cell.

[0099] 48. The fusosome of any of the preceding embodiments, wherein the fusosome delivers the nucleic acid, e.g., retroviral nucleic, acid to a target cell, e.g., a CNS cell, a pan-neuronal cell, a GABAergic neuron, a Glutamatergic neuron, a Cholinergic neuron, a Dopaminergic neuron, a Serotonergic neuron, a glial cell an astrocyte, a microglial cell, an oligodendrocyte, or a choroid plexus cell.

[0100] 49. The fusosome of any of the preceding embodiments, wherein at least 0.00001%, 0.0001%, 0.001%, 0.001%, 0.01%, 0.1%, 1%, 2%, 5%, 10%, 20%, 30%, 40%, 50%, 60%, 70%, 80%, or 90% of target cells (e.g., one or more of a CNS cell, a pan-neuronal cell, a GABAergic neuron, a Glutamatergic neuron, a Cholinergic neuron, a Dopaminergic neuron, a Serotonergic neuron, a glial cell, an astrocyte, a microglial cell, an oligodendrocyte, or a choroid plexus cell) comprise the nucleic acid, e.g., retroviral nucleic acid, e.g., using quantitative PCR, e.g., using an assay of Example 3.

[0101] 50. The fusosome of any of the preceding embodiments, wherein at least 0.00001%, 0.0001%, 0.001%, 0.001%, 0.01%, 0.1%, 1%, 2%, 5%, 10%, 20%, 30%, 40%, 50%, 60%, 70%, 80%, or 90% of target cells (e.g., a CNS cell, a pan-neuronal cell, a GABAergic neuron, a Glutamatergic neuron, a Cholinergic neuron, a Dopaminergic neuron, a Serotonergic neuron, a glial cell, an astrocyte, a microglial cell, an oligodendrocyte, or a choroid plexus cell) comprise the exogenous agent.

[0102] 51. The fusosome of any of the preceding embodiments, wherein, upon administration, the ratio of target cells comprising the nucleic acid, e.g., retroviral nucleic acid, to non-target cells comprising the nucleic acid, e.g., retroviral nucleic acid, is at least 1.5, 2, 3, 4, 5, 10, 25, 50, 100, 500, 1000, 5000, 10,000, e.g., according to a quantitative PCR assay, e.g., using assays of Example 1 and Example 3.

[0103] 52. The fusosome of any of the preceding embodiments, wherein the ratio of the average copy number of nucleic acid, e.g., retroviral nucleic acid, or a portion thereof in target cells to the average copy number of nucleic acid, e.g., retroviral nucleic acid, or a portion thereof in non-target cells is at least 1.5, 2, 3, 4, 5, 10, 25, 50, 100, 500, 1000, 5000, 10,000, e.g., according to a quantitative PCR assay, e.g., using assays of Example 1 and Example 3.

[0104] 53. The fusosome of any of the preceding embodiments, wherein the ratio of the median copy number of of nucleic acid, e.g., retroviral nucleic acid, or a portion thereof in target cells to the median copy number of nucleic acid, e.g., retroviral nucleic acid, or a portion thereof in non-target cells is at least 1.5, 2, 3, 4, 5, 10, 25, 50, 100, 500, 1000, 5000, 10,000, e.g., according to a quantitative PCR assay, e.g., using assays of Example 1 and Example 3.

[0105] 54. The fusosome of any of the preceding embodiments, wherein the ratio of target cells comprising the exogenous RNA agent to non-target cells comprising the exogenous RNA agent is at least 1.5, 2, 3, 4, 5, 10, 25, 50, 100, 500, 1000, 5000, 10,000, e.g., according to a reverse transcription quantitative PCR assay.

[0106] 55. The fusosome of any of the preceding embodiments, wherein the ratio of the average exogenous RNA agent level of target cells to the average exogenous RNA agent level of non-target cells is at least 1.5, 2, 3, 4, 5, 10, 25, 50, 100, 500, 1000, 5000, 10,000, e.g., according to a reverse transcription quantitative PCR assay.

[0107] 56. The fusosome of any of the preceding embodiments, wherein the ratio of the median exogenous RNA agent level of target cells to the median exogenous RNA agent level of non-target cells is at least 1.5, 2, 3, 4, 5, 10, 25, 50, 100, 500, 1000, 5000, 10,000, e.g., according to a reverse transcription quantitative PCR assay.

[0108] 57. The fusosome of any of the preceding embodiments, wherein the ratio of target cells comprising the exogenous protein agent to non-target cells comprising the exogenous protein agent is at least 1.5, 2, 3, 4, 5, 10, 25, 50, 100, 500, 1000, 5000, 10,000, e.g., according to a FACS assay, e.g., using assays of Example 2 and Example 4.

[0109] 58. The fusosome of any of the preceding embodiments, wherein the ratio of the average exogenous protein agent level of target cells to the average exogenous protein agent level of non-target cells is at least 1.5, 2, 3, 4, 5, 10, 25, 50, 100, 500, 1000, 5000, 10,000, e.g., according to a FACS assay, e.g., using assays of Example 2 and Example 4.

[0110] 59. The fusosome of any of the preceding embodiments, wherein the ratio of the median exogenous protein agent level of target cells to the median exogenous protein agent level of non-target cells is at least 1.5, 2, 3, 4, 5, 10, 25, 50, 100, 500, 1000, 5000, 10,000, e.g., according to a FACS assay, e.g., using assays of Example 2 and Example 4.

[0111] 60. The fusosome of any of the preceding embodiments, which comprises one or both of:
[0112] i) an exogenous or overexpressed immunosuppressive protein on the lipid bilayer, e.g., envelope; and
[0113] ii) an immunostimulatory protein that is absent or present at reduced levels (e.g., reduced by at least 10%, 20%, 30%, 40%, 50%, 60%, 70%, 80%, or 90%) compared to a fusosome generated from an otherwise similar, unmodified source cell.

[0114] 61. The fusosome of any of the preceding embodiments, which comprises one or more of:
[0115] i) a first exogenous or overexpressed immunosuppressive protein on the lipid bilayer, e.g., envelope, and a second exogenous or overexpressed immunosuppressive protein on the lipid bilayer, e.g., envelope;
[0116] ii) a first exogenous or overexpressed immunosuppressive protein on the lipid bilayer, e.g., envelope, and a second immunostimulatory protein that is absent or present at reduced levels (e.g., reduced by at least 10%, 20%, 30%, 40%, 50%, 60%, 70%, 80%, or 90%) compared to a fusosome generated from an otherwise similar, unmodified source cell; or
[0117] iii) a first immunostimulatory protein that is absent or present at reduced levels (e.g., reduced by at least 10%, 20%, 30%, 40%, 50%, 60%, 70%, 80%, or 90%) compared to a fusosome generated from an otherwise similar, unmodified source cell and a second immunostimulatory protein that is absent or present at reduced levels (e.g., reduced by at least 10%, 20%, 30%, 40%, 50%, 60%, 70%, 80%, or 90%) compared to a fusosome generated from an otherwise similar, unmodified source cell.

[0118] 62. The fusosome of any of the preceding embodiments, wherein the fusosome is in circulation at least 0.5, 1, 2, 3, 4, 6, 12, 18, 24, 36, or 48 hours after administration to the subject.

[0119] 63. The fusosome of any of the preceding embodiments, wherein at least 0.001%, 0.01%, 0.1%, 1%, 10%, 20%, 30%, 40%, 50%, 60%, 70%, 80%, 90%, or 100% of fusosomes are in circulation 30 minutes after administration.

[0120] 64. The fusosome of any of the preceding embodiments, wherein at least 0.001%, 0.01%, 0.1%, 1%, 10%, 20%, 30%, 40%, 50%, 60%, 70%, 80%, 90%, or 100% of fusosomes are in circulation 1 hour after administration.

[0121] 65. The fusosome of any of the preceding embodiments, wherein at least 0.001%, 0.01%, 0.1%, 1%, 10%, 20%, 30%, 40%, 50%, 60%, 70%, 80%, 90%, or 100% of fusosomes are in circulation 2 hours after administration.

[0122] 66. The fusosome of any of the preceding embodiments, wherein at least 0.001%, 0.01%, 0.1%, 1%, 10%, 20%, 30%, 40%, 50%, 60%, 70%, 80%, 90%, or 100% of fusosomes are in circulation 4 hours after administration.

[0123] 67. The fusosome of any of the preceding embodiments, wherein at least 0.001%, 0.01%, 0.1%, 1%, 10%, 20%, 30%, 40%, 50%, 60%, 70%, 80%, 90%, or 100% of fusosomes are in circulation 8 hours after administration.

[0124] 68. The fusosome of any of the preceding embodiments, wherein at least 0.001%, 0.01%, 0.1%, 1%, 10%, 20%, 30%, 40%, 50%, 60%, 70%, 80%, 90%, or 100% of fusosomes are in circulation 12 hours after administration.

[0125] 69. The fusosome of any of the preceding embodiments, wherein at least 0.001%, 0.01%, 0.1%, 1%, 10%, 20%, 30%, 40%, 50%, 60%, 70%, 80%, 90%, or 100% of fusosomes are in circulation 18 hours after administration.

[0126] 70. The fusosome of any of the preceding embodiments, wherein at least 0.001%, 0.01%, 0.1%, 1%, 10%, 20%, 30%, 40%, 50%, 60%, 70%, 80%, 90%, or 100% of fusosomes are in circulation 24 hours after administration.

[0127] 71. The fusosome of any of the preceding embodiments, wherein at least 0.001%, 0.01%, 0.1%, 1%, 10%, 20%, 30%, 40%, 50%, 60%, 70%, 80%, 90%, or 100% of fusosomes are in circulation 36 hours after administration.

[0128] 72. The fusosome of any of the preceding embodiments, wherein at least 0.001%, 0.01%, 0.1%, 1%, 10%, 20%, 30%, 40%, 50%, 60%, 70%, 80%, 90%, or 100% of fusosomes are in circulation 48 hours after administration.

[0129] 73. The fusosome of any of the preceding embodiments, which has a reduction in immunogenicity as measured by a reduction in humoral response following one or more administration of the fusosome to an appropriate animal model, e.g., an animal model described herein, compared to reference fusosome, e.g., an unmodified fusosome otherwise similar to the fusosome.

[0130] 74. The fusosome of embodiment 73, wherein the reduction in humoral response is measured in a serum sample by an anti-cell antibody titre, e.g., anti-retroviral antibody titre, e.g., by ELISA.

[0131] 75. The fusosome of any of the preceding embodiments, wherein a serum sample from animals administered the fusosome has a reduction of 1%, 5%, 10%, 20%, 30%, 40%, 50%, 60%, 70%, 80%, 90%, or more of an anti-fusosome antibody titer compared to the serum sample from a subject administered an unmodified cell.

[0132] 76. The fusosome of any of the preceding embodiments, wherein a serum sample from a subject administered the fusosome has an increased anti-cell antibody titre, e.g., increased by 1%, 2%, 5%, 10%, 20%, 30%, or 40% from baseline, e.g., wherein baseline refers to serum sample from the same subject before administration of the fusosome.

[0133] 77. The fusosome of any of the preceding embodiments, wherein:

[0134] the subject to be administered the fusosome or a pharmaceutical composition comprising the fusosome has, or is known to have, or is tested for, a pre-existing antibody (e.g., IgG or IgM) reactive with the fusosome;

[0135] the subject to be administered the fusosome does not have detectable levels of a pre-existing antibody reactive with the fusosome;

[0136] a subject that has received the fusosome or a pharmaceutical composition comprising the fusosome has, or is known to have, or is tested for, an antibody (e.g., IgG or IgM) reactive with the fusosome;

[0137] the subject that received the fusosome or a pharmaceutical composition comprising the fusosome (e.g., at least once, twice, three times, four times, five times, or more) does not have detectable levels of antibody reactive with the fusosome; or

[0138] levels of antibody do not rise more than 1%, 2%, 5%, 10%, 20%, or 50% between two timepoints, the first timepoint being before the first administration of the fusosome, and the second timepoint being after one or more administrations of the fusosome.

[0139] 78. The fusosome of any of the preceding embodiments, wherein the fusosome is produced by the methods of Example 5, 6, or 7, e.g., from cells transfected with HLA-G or HLA-E cDNA.

[0140] 79. The fusosome of any of the preceding embodiments, wherein fusosomes generated from NMC-HLA-G cells have a decreased percentage of lysis, e.g., PBMC mediated lysis, NK cell mediated lysis, and/or CD8+ T cell mediated lysis, at specific timepoints as compared to fusosomes generated from NMCs or NMC-empty vector.

[0141] 80. The fusosome of any of the preceding embodiments, wherein the modified fusosome evades phagocytosis by macrophages.

[0142] 81. The fusosome of any of the preceding embodiments, wherein the fusosome is produced by the methods of Example 8, e.g., from cells transfected with CD47 cDNA.

[0143] 82. The fusosome of any of the preceding embodiments, wherein the phagocytic index is reduced when macrophages are incubated with fusosomes derived from NMC-CD47, versus those derived from NMC, or NMC-empty vector.

[0144] 83. The fusosome of any of the preceding embodiments, which has a reduction in macrophage phagocytosis, e.g., a reduction of 1%, 5%, 10%, 20%, 30%, 40%, 50%, 60%, 70%, 80%, 90%, or more in macrophage phagocytosis compared to a reference fusosome, e.g., an unmodified fusosome otherwise similar to the fusosome, wherein the reduction in macrophage phagocytosis is determined by assaying the phagocytosis index in vitro, e.g., as described in Example 8.

[0145] 84. The fusosome of any of the preceding embodiments, wherein the fusosome composition has a phagocytosis index of 0, 1, 10, 100, or more, e.g., as measured by an assay of Example 8, when incubated with macrophages in an in vitro assay of macrophage phagocytosis.

[0146] 85. The fusosome of any of the preceding embodiments, which is modified and has reduced complement activity compared to an unmodified fusosome.

[0147] 86. The fusosome of any of the preceding embodiments, which is produced by the methods of Example 9, e.g., from cells transfected with a cDNA coding for a complement regulatory protein, e.g., DAF.

[0148] 87. The fusosome of any of the preceding embodiments, wherein the dose of fusosome at which 200 pg/ml of C3a is present is greater for the modified fusosome (e.g., HEK293-DAF) incubated with corresponding mouse sera (e.g., HEK-293 DAF mouse sera) than for the reference fusosome (e.g., HEK293 retroviral vector) incubated with corresponding mouse sera (e.g., HEK293 mouse sera).

[0149] 88. The fusosome of any of the preceding embodiments, wherein the dose of fusosome at which 200 pg/ml of C3a is present is greater for for the modified fusosome (e.g., HEK293-DAF) incubated with naive mouse sera than for the reference fusosome (e.g., HEK293 retroviral vector) incubated with naive mouse sera.

[0150] 89. The fusosome of any of the preceding embodiments, wherein the fusosome is resistant to complement mediated inactivation in patient serum 30 minutes after administration according to an assay of Example 9.

[0151] 90. The fusosome of any of the preceding embodiments, wherein at least 0.001%, 0.01%, 0.1%, 1%, 10%, 20%, 30%, 40%, 50%, 60%, 70%, 80%, 90%, or 100% of fusosomes are resistant to complement mediated inactivation.

[0152] 91. The fusosome of any of embodiments 86-90, wherein the complement regulatory protein comprises one or more of proteins that bind decay-accelerating factor (DAF, CD55), e.g. factor H (FH)-like protein-1 (FHL-1), e.g. C4b-binding protein (C4BP), e.g. complement receptor 1 (CD35), e.g. Membrane cofactor protein (MCP, CD46), eg. Protectin (CD59), e.g. proteins that inhibit the classical and alternative complement pathway CD/C5 convertase enzymes, e.g. proteins that regulate MAC assembly.

[0153] 92. The fusosome of any of the preceding embodiments, which is produced by the methods of Example 10, e.g., from cells transfected with a DNA coding for an shRNA targeting MHC class I, e.g., wherein retroviral vectors derived from NMC-shMHC class I has lower expression of MHC class I compared to NMCs and NMC-vector control.

[0154] 93. The fusosome of any of the preceding embodiments, wherein a measure of immunogenicity for fusosomes is serum inactivation, e.g., serum inactivation measured as described herein, e.g., as described in Example 11.

[0155] 94. The fusosome of any of the preceding embodiments, wherein the percent of cells which receive the exogenous agent is not different between fusosome samples that have been incubated with serum and heat-inactivated serum from fusosome naïve mice.

[0156] 95. The fusosome of any of the preceding embodiments, wherein the percent of cells which receive the exogenous agent is not different between fusosome samples that have been incubated with serum from fusosome naïve mice and no-serum control incubations.

[0157] 96. fusosome of any of the preceding embodiments, wherein the percent of cells which receive the exogenous agent is less in fusosome samples that have been incubated with positive control serum than in fusosome samples that have been incubated with serum from fusosome naïve mice.

[0158] 97. The fusosome of any of the preceding embodiments, wherein a modified fusosome, e.g., modified by a method described herein, has a reduced (e.g., reduced compared to administration of an unmodified fusosome) serum inactivation following multiple (e.g., more than one, e.g., 2 or more), administrations of the modified fusosome.

[0159] 98. The fusosome of any of the preceding embodiments, wherein a fusosome described herein is not inactivated by serum following multiple administrations.

[0160] 99. The fusosome of any of the preceding embodiments, wherein a measure of immunogenicity for the fusosome is serum inactivation, e.g., after multiple administrations, e.g., serum inactivation after multiple administrations measured as described herein, e.g., as described in Example 12.

[0161] 100. The fusosome of any of the preceding embodiments, wherein the percent of cells which receive the exogenous agent is not different between fusosome samples that have been incubated with serum and heat-inactivated serum from mice treated with modified (e.g., HEK293-HLA-G) fusosomes.

[0162] 101. The fusosome of any of the preceding embodiments, wherein the percent of cells which receive the exogenous agent is not different between fusosome samples that have been incubated from mice treated 1, 2, 3, 5 or 10 times with modified (e.g., HEK293-HLA-G) fusosomes.

[0163] 102. The fusosome of any of the preceding embodiments, wherein the percent of cells which receive the exogenous agent is not different between fusosome samples that have been incubated with serum from mice treated with vehicle and from mice treated with modified (e.g., HEK293-HLA-G) fusosomes.

[0164] 103. The fusosome of any of the preceding embodiments, wherein the percent of cells which receive the exogenous agent is less for fusosomes derived from a reference cell (e.g., HEK293) than for modified (e.g., HEK293-HLA-G) fusosomes.

[0165] 104. The fusosome of any of the preceding embodiments, wherein a measure of immunogenicity for a fusosome is antibody response.

[0166] 105. The fusosome of any of the preceding embodiments, wherein a subject that receives a fusosome described herein has pre-existing antibodies which bind to and recognize fusosome, e.g., measured as described herein, e.g., as described in Example 13.

[0167] 106. The fusosome of any of the preceding embodiments, wherein serum from fusosome-naïve mice shows more signal (e.g., fluorescence) than the negative control, e.g., serum from a mouse depleted of IgM and IgG, e.g., indicating that in immunogenicity has occurred.

[0168] 107. The fusosome of any of the preceding embodiments, wherein serum from fusosome-naïve mice shows similar signal (e.g., fluorescence) compared to the negative control, e.g., indicating that immunogenicity did not detectably occur.

[0169] 108. The fusosome of any of the preceding embodiments, which is a modified fusosome, e.g., modified by a method described herein, and which has a reduced (e.g., reduced compared to administration of an unmodified fusosome) humoral response following multiple (e.g., more than one, e.g., 2 or more), administrations of the modified fusosome, e.g., measured as described herein, e.g., as described in Example 14.

[0170] 109. The fusosome of any of the preceding embodiments, wherein the fusosome is produced by the methods of Example 5, 6, 7, or 14, e.g., from cells transfected with HLA-G or HLA-E cDNA.

[0171] 110. The fusosome of any of the preceding embodiments, wherein humoral response is assessed by determining a value for the level of anti-fusosome antibodies (e.g., IgM, IgG1, and/or IgG2 antibodies).

[0172] 111. The fusosome of any of the preceding embodiments, wherein modified (e.g., NMC-HLA-G) fusosomes have decreased anti-viral IgM or IgG1/2 antibody titers (e.g., as measured by fluorescence intensity on FACS) after injections, as compared to a control, e.g., NMC fusosomes or NMC-empty fusosomes.

[0173] 112. The fusosome of any of the preceding embodiments, wherein recipient cells are not targeted by an antibody response, or an antibody response will be below a reference level, e.g., measured as described herein, e.g., as described in Example 15.

[0174] 113. The fusosome of any of the preceding embodiments, signal (e.g., mean fluorescence intensity) is similar for recipient cells from mice treated with fusosomes and mice treated with PBS.

[0175] 114. The fusosome of any of the preceding embodiments, wherein a measure of the immunogenicity of recipient cells is the macrophage response.

[0176] 115. The fusosome of any of the preceding embodiments, wherein recipient cells are not targeted by macrophages, or are targeted below a reference level.

[0177] 116. The fusosome of any of the preceding embodiments, wherein the phagocytic index, e.g., measured as described herein, e.g., as described in Example 16, is similar for recipient cells derived from mice treated with fusosomes and mice treated with PBS.

[0178] 117. The fusosome of any of the preceding embodiments, wherein a measure of the immunogenicity of recipient cells is the PBMC response.

[0179] 118. The fusosome of any of the preceding embodiments, wherein recipient cells do not elicit a PBMC response.

[0180] 119. The fusosome of any of the preceding embodiments, wherein the percent of CD3+/CMG+ cells is similar for recipient cells derived from mice treated with fusosome and mice treated with PBS, e.g., as measured as described herein, e.g., as described in Example 17.

[0181] 120. The fusosome of any of the preceding embodiments, wherein a measure of the immunogenicity of recipient cells is the natural killer cell response.

[0182] 121. The fusosome of any of the preceding embodiments, wherein recipient cells do not elicit a natural killer cell response or elicit a lower natural killer cell response, e.g., lower than a reference value.

[0183] 122. The fusosome of any of the preceding embodiments, wherein the percent of CD3+/CMG+ cells is similar for recipient cells derived from mice treated with fusosome and mice treated with PBS, e.g., as measured as described herein, e.g., as described in Example 18.

[0184] 123. The fusosome of any of the preceding embodiments, wherein a measure of the immunogenicity of recipient cells is the CD8+ T cell response.

[0185] 124. The fusosome of any of the preceding embodiments, wherein recipient cells do not elicit a CD8+ T cell response or elicit a lower CD8+ T cell response, e.g., lower than a reference value.

[0186] 125. The fusosome of any of the preceding embodiments, wherein the percent of CD3+/CMG+ cells is similar for recipient cells derived from mice treated with fusosome and mice treated with PBS, e.g., as measured as described herein, e.g., as described in Example 19.

[0187] 126. The fusosome of any of the preceding embodiments, wherein the fusogen is a re-targeted fusogen.

[0188] 127. The fusosome of any of the preceding embodiments, which comprises a nucleic acid, e.g., retroviral nucleic acid, that encodes one or both of: (i) a positive target cell-specific regulatory element operatively linked to a nucleic acid encoding an exogenous agent, or (ii) a non-target cell-specific regulatory element or negative TCSRE operatively linked to the nucleic acid encoding the exogenous agent.

[0189] 128. A pharmaceutical composition comprising the fusosome of any of the preceding embodiments, and a pharmaceutically acceptable carrier, diluent, or excipient.

[0190] 129. A method of delivering an exogenous agent to a subject (e.g., a human subject) comprising administering to the subject a fusosome of any of embodiments 1-127 or pharmaceutical composition of embodiment 128, thereby delivering the exogenous agent to the subject.

[0191] 130. A method of modulating a function, in a subject (e.g., a human subject), target tissue or target cell (e.g., a CNS cell, e.g., a neuron or a glial cell), comprising contacting, e.g., administering to, the subject, the target tissue or the target cell a fusosome of any of embodiments 1-127, or the pharmaceutical composition of embodiment 128.

[0192] 131. The method of embodiment 130, wherein the target tissue or the target cell is present in a subject.

[0193] 132. A method of treating a genetic deficiency in a subject (e.g., a human subject) comprising administering to the subject a fusosome of any of embodiments 1-127 or the pharmaceutical composition of claim 128.

[0194] 133. The method of embodiment 132, wherein the genetic deficiency is a genetic deficiency of Table 5 or Table 6.

[0195] 134. The method of embodiment 132 or 133, wherein the genetic deficiency is a genetic deficiency able to be treated by the payload gene encoding the exogenous agent.

[0196] 135. The method of any of embodiments 132-134, wherein the genetic deficiency is associated with a CNS disease or disorder or a lysosomal disease or disorder, wherein the method treats the CNS disease or disorder or a lysosomal disease or disorder.

[0197] 136. The method of embodiment 135, wherein the CNS disease or disorder or a lysosomal disease or disorder Spinocerebellar Ataxia; Autosomal Recessive, Type 1; Ataxia with Oculomotor Apraxia, Type 2; Fragile X Syndrome; Cerebral Creatine Deficiency Syndrome 1; Angelman Syndrome; Amyotrophic Lateral Sclerosis; Friedreich's Ataxia; Rett Syndrome; Canavan Disease; Pyridoxine-Dependent Epilepsy; Batten Disease, Fucosidosis; Krabbe Disease; Tay Sachs Disease; Sandhoff Disease; Beta-mannosidosis; Metachromatic Leukodystrophy; Mucolipidosis Type IIIa; Mucolipidosis Type IIIb; or Mucolipidosis Type IV.

[0198] 137. A fusosome of any of embodiments 1-127 or pharmaceutical composition of embodiment 128 for use in treating a subject (e.g. a human subject) with a genetic deficiency.

[0199] 138. Use of a fusosome of any of embodiments 1-127 or pharmaceutical composition of embodiment 128 for manufacture of a medicament for use in treating a subject (e.g. a human subject) with a genetic deficiency.

[0200] 139. The fusosome or pharmaceutical composition for use of embodiment 137 or the use of embodiments 138, wherein the fusosome comprises a payload gene encoding an exogenous agent for treating the genetic deficiency.

[0201] 140. The fusosome or pharmaceutical composition for use of embodiment 137 or 139 or the use of embodiment 138 or 139, wherein the genetic deficiency is associated with a CNS disease or disorder or a lysosomal disease or disorder, wherein the method treats the CNS disease or disorder or a lysosomal disease or disorder.

[0202] 141. The fusosome or pharmaceutical composition for use of embodiment 137, 139 or 140, or the use of embodiment 138, 139 or 140, wherein the CNS disease or disorder or a lysosomal disease or disorder Spinocerebellar Ataxia; Autosomal Recessive, Type 1; Ataxia with Oculomotor Apraxia, Type 2; Fragile X Syndrome; Cerebral Creatine Deficiency Syndrome 1; Angelman Syndrome; Amyotrophic Lateral Sclerosis; Friedreich's Ataxia; Rett Syndrome; Canavan Disease; Pyridoxine-Dependent Epilepsy; Batten Disease, Fucosidosis; Krabbe Disease; Tay Sachs Disease; Sandhoff Disease; Beta-mannosidosis; Metachromatic Leukodystrophy; Mucolipidosis Type IIIa; Mucolipidosis Type IIIb; or Mucolipidosis Type IV.

[0203] 142. A method of making a fusosome of any of embodiments 1-127, comprising:

[0204] a) providing a cell that comprises the nucleic acid, e.g., retroviral nucleic acid, and the fusogen;

[0205] b) culturing the cell under conditions that allow for production of the fusosome, and

[0206] c) separating, enriching, or purifying the fusosome from the cell, thereby making the fusosome.

[0207] Other features, objects, and advantages of the invention will be apparent from the description and drawings, and from the claims.

[0208] Unless otherwise defined, all technical and scientific terms used herein have the same meaning as commonly understood by one of ordinary skill in the art to which this invention belongs. All publications, patent applications, patents, and other references mentioned herein are incorporated by reference in their entirety. For example, all GenBank, Unigene, and Entrez sequences referred to herein, e.g., in any Table herein, are incorporated by reference. Unless otherwise specified, the sequence accession numbers specified herein, including in any Table herein, refer to the database entries current as of May 15, 2018. When one gene or protein references a plurality of sequence accession numbers, all of the sequence variants are encompassed. In addition, the materials, methods, and examples are illustrative only and not intended to be limiting.

### BRIEF DESCRIPTION OF THE DRAWINGS

[0209] The following detailed description of the invention will be better understood when read in conjunction with the appended drawings. For the purpose of illustrating the invention, there are shown in the drawings described herein certain embodiments, which are presently exemplified. It should be understood, however, that the invention is not limited to the precise arrangement and instrumentalities of the embodiments shown in the drawings.

[0210] FIG. 1 quantifies staining of fusosomes with a dye for F-actin.

[0211] FIG. 2 is a graph showing the capacity for fusosomes and parent cells to polymerase actin over a period of 3, 5, and 24 hours.

[0212] FIG. 3 is a table showing size distribution statistics of fusosomes and parental cells as measured by NTA and microscopy.

[0213] FIG. 4 is a table showing the average size and volume of fusosomes and parental cells.

[0214] FIG. 5 is a series of diagrams showing the soluble:insoluble ratio observed for fusosomes or a cell preparation.

[0215] FIG. 6 is a series of diagrams showing MvH(CD8)+F fusosome fusion to target or non-target cells and absolute amount of targeted fusion.

[0216] FIG. 7 is a diagram showing 2-NBDG mean fluorescence intensity in VSV-G fusosomes.

[0217] FIG. 8 is a diagram showing esterase activity in the cytosol of VSV-G fusosomes.

[0218] FIGS. 9A-9B are a series of diagrams showing Cre recombinase delivery by fusosomes as detected by biolumniscent imaging in mice. (A) Ventral image and luminescent signal overlay of exposed liver and spleen of IV fusosome treated mice (1× and 3× concentration). Lower portion is luminescent signal alone. (B) Total flux signal of fusosome targeted spleen and liver; y-scale is on log10 scale. Mice treated with a concentration of 3× fusosome treatment had a significantly greater signal in the spleen (p=0.0004) than background 72 hours post-treatment.

[0219] FIGS. 10A-10B are a series of diagrams showing Cre recombinase to murine liver and spleen by fusosomes as detected by bioluminescent imaging. (A) From left to right; dorsal image and luminescent signal overlay of excised liver, heart, lungs, kidney, small intestines, pancreas, and spleen collected and imaged within 5 minutes of euthanasia. Lower portion is luminescent signal alone. (B) Total flux signal of fusosome targeted spleen and liver and other tissues; y-scale is on log10 scale. Mice treated with a concentration of 3× fusosome treatment had a significantly greater signal in the spleen(p<0.0001) as compared to the tissue with the lowest signal (heart).

[0220] FIG. 11 is a table showing delivery of Cre cargo by NivG+F fusosomes via a non-endocytic pathway.

[0221] FIG. 12 is a graph showing GAPDH: Total protein ratios measured by bicinchoninic acid assay in fusosomes and parental cells.

[0222] FIG. 13 is a graph showing lipid: protein ratios measured by bicinchoninic acid assay in fusosomes and parental cells.

[0223] FIG. 14 is a graph showing protein: DNA ratios measured by bicinchoninic acid assay in fusosomes and parental cells.

[0224] FIG. 15 is a graph showing lipids: DNA ratios measured by bicinchoninic acid assay in fusosomes and parental cells.

[0225] FIG. 16 is a graph showing protein levels of the exosome marker CD63 in exosomes and fusosomes.

[0226] FIG. 17 is a graph showing the intensity of calnexin signal detected in fusosomes and parental cells.

[0227] FIG. 18 is a graph showing lipid:DNA ratios determined for fusosomes and parental cells.

[0228] FIGS. 19A-19B are a series of graphs showing the proportion of lipid species as a percentage of total lipids in parental cells, exosomes, and fusosomes.

[0229] FIG. 20 is a series of graphs showing the protein content of parental cells, exosomes, and fusosomes with respect to proteins associated with specific compartments, as indicated.

[0230] FIG. 21 is a series of graphs showing the level of ARRDC1 (left panel) or TSG101 (right panel) as a percentage of total protein content in parental cells, exosomes, and fusosomes.

### DETAILED DESCRIPTION

[0231] The present disclosure provides, at least in part, fusosome methods and compositions for in vivo delivery. In some embodiments, the fusosome comprises a combination of elements that promote specificity for target cells, e.g., one or more of a re-targeted fusogen, a positive target cell-specific regulatory element, and a non-target cell-specific regulatory element. In some embodiments, the fusosome comprises one or more modifications that decrease an immune response against the fusosome.

### I. Definitions

[0232] Terms used in the claims and specification are defined as set forth below unless otherwise specified.

[0233] As used herein, “detectably present”, when used in the context of an exogenous agent being detectably present, means that the exogenous agent itself is detectably present. For instance, if the exogenous agent is a protein, the exogenous protein agent can be detectably present regardless of whether a nucleic acid that encodes it is detectably present or not.

[0234] As used herein, “fusosome” refers to a bilayer of amphipathic lipids enclosing a lumen or cavity and a fusogen that interacts with the amphipathic lipid bilayer. In embodiments, the fusosome comprises a nucleic acid. In some embodiments, the fusosome is a membrane enclosed preparation. In some embodiments, the fusosome is derived from a source cell.

[0235] As used herein, “fusosome composition” refers to a composition comprising one or more fusosomes.

[0236] As used herein, “fusogen” refers to an agent or molecule that creates an interaction between two membrane enclosed lumens. In embodiments, the fusogen facilitates fusion of the membranes. In other embodiments, the fusogen creates a connection, e.g., a pore, between two lumens (e.g., a lumen of a retroviral vector and a cytoplasm of a target cell). In some embodiments, the fusogen comprises a complex of two or more proteins, e.g., wherein neither protein has fusogenic activity alone. In some embodiments, the fusogen comprises a targeting domain.

[0237] As used herein, an “insulator element” refers to a nucleotide sequence that blocks enhancers or prevents heterochromatin spreading. An insulator element can be wild-type or mutant.

[0238] The term “effective amount” as used herein means an amount of a pharmaceutical composition which is sufficient enough to significantly and positively modify the symptoms and/or conditions to be treated (e.g., provide a positive clinical response). The effective amount of an active ingredient for use in a pharmaceutical composition will vary with the particular condition being treated, the severity of the condition, the duration of treatment, the nature of concurrent therapy, the particular active ingredient(s) being employed, the particular pharmaceutically-acceptable excipient(s) and/or carrier(s) utilized, and like factors with the knowledge and expertise of the attending physician.

[0239] An “exogenous agent” as used herein with reference to a virus, VLP or fusosome, refers to an agent that is neither comprised by nor encoded in the corresponding wild-type virus or fusogen made from a corresponding wild-type source cell. In some embodiments, the exogenous agent does not naturally exist, such as a protein or nucleic acid that has a sequence that is altered (e.g., by insertion, deletion, or substitution) relative to a naturally occurring protein. In some embodiments, the exogenous agent does not naturally exist in the source cell. In some embodiments, the exogenous agent exists naturally in the source cell but is exogenous to the virus. In some embodiments, the exogenous agent does not naturally exist in the recipient cell. In some embodiments, the exogenous agent exists naturally in the recipient cell, but is not present at a desired level or at a desired time. In some embodiments, the exogenous agent comprises RNA or protein.

[0240] The term “pharmaceutically acceptable” as used herein, refers to excipients, compositions and/or dosage forms which are, within the scope of sound medical judgment, suitable for use in contact with the tissues of human beings and animals without excessive toxicity, irritation, allergic response, or other problem or complication, commensurate with a reasonable benefit/risk ratio.

[0241] As used herein, a “promoter” refers to a cis-regulatory DNA sequence that, when operably linked to a gene coding sequence, drives transcription of the gene. The promoter may comprise a transcription factor binding sites. In some embodiments, a promoter works in concert with one or more enhancers which are distal to the gene.

[0242] As used herein, a “positive target cell-specific regulatory element” (or positive TCSRE) refers to a nucleic acid sequence that increases the level of an exogenous agent in a target cell compared to in a non-target cell, wherein the nucleic acid encoding the exogenous agent is operably linked to the positive TCSRE. In some embodiments, the positive TCSRE is a functional nucleic acid sequence, e.g., the positive TCSRE can comprise a promoter or enhancer. In some embodiments, the positive TCSRE encodes a functional RNA sequence, e.g., the positive TCSRE can encode a splice site that promotes correct splicing of the RNA in the target cell. In some embodiments, the positive TCSRE encodes a functional protein sequence, or the positive TCSRE can encode a protein sequence that promotes correct post-translational modification of the protein. In some embodiments, the positive TCSRE decreases the level or activity of a downregulator or inhibitor of the exogenous agent.

[0243] As used herein, a “negative target cell-specific regulatory element” (or negative TCSRE) refers to a nucleic acid sequence that decreases the level of an exogenous agent in a non-target cell compared to in a target cell, wherein the nucleic acid encoding the exogenous agent is operably linked to the negative TCSRE. In some embodiments, the negative TCSRE is a functional nucleic acid sequence, e.g., a miRNA recognition site that causes degradation or inhibition of the retroviral nucleic acid in a non-target cell. In some embodiments, the nucleic acid sequence encodes a functional RNA sequence, e.g., the nucleic acid encodes an miRNA sequence present in an mRNA encoding an exogenous protein agent, such that the mRNA is degraded or inhibited in a non-target cell. In some embodiments, the negative TCSRE increases the level or activity of a downregulator or inhibitor of the exogenous agent.

[0244] As used herein, a “non-target cell-specific regulatory element” (or NTCSRE) refers to a nucleic acid sequence that decreases the level of an exogenous agent in a non-target cell compared to in a target cell, wherein the nucleic acid encoding the exogenous agent is operably linked to the NTCSRE. In some embodiments, the NTCSRE is a functional nucleic acid sequence, e.g., a miRNA recognition site that causes degradation or inhibition of the retroviral nucleic acid in a non-target cell. In some embodiments, the nucleic acid sequence encodes a functional RNA sequence, e.g., the nucleic acid encodes an miRNA sequence present in an mRNA encoding an exogenous protein agent, such that the mRNA is degraded or inhibited in a non-target cell. In some embodiments, the NTCSRE increases the level or activity of a downregulator or inhibitor of the exogenous agent. The terms “negative TCSRE” and “NTCSRE” are used interchangeably herein.

[0245] As used herein, a “non-CNS cell specific regulatory element” refers to a non-target cell-specific regulatory element (NTCSRE), wherein the target cell is a CNS cell. Thus, a non-CNS cell specific regulatory element refers to a nucleic acid sequence that decreases the level of an exogenous agent in a non-CNS cell compared to in a CNS cell, wherein the nucleic acid encoding the exogenous agent is operably linked to the non-CNS cell-specific regulatory element.

[0246] As used herein, a “re-targeted fusogen” refers to a fusogen that comprises a targeting moiety having a sequence that is not part of the naturally-occurring form of the fusogen. In embodiments, the fusogen comprises a different targeting moiety relative to the targeting moiety in the naturally-occurring form of the fusogen. In embodiments, the naturally-occurring form of the fusogen lacks a targeting domain, and the re-targeted fusogen comprises a targeting moiety that is absent from the naturally-occurring form of the fusogen. In embodiments, the fusogen is modified to comprise a targeting moiety. In embodiments, the fusogen comprises one or more sequence alterations outside of the targeting moiety relative to the naturally-occurring form of the fusogen, e.g., in a transmembrane domain, fusogenically active domain, or cytoplasmic domain.

[0247] As used herein, a “retroviral nucleic acid” refers to a nucleic acid containing at least the minimal sequence requirements for packaging into a retrovirus or retroviral vector, alone or in combination with a helper cell, helper virus, or helper plasmid. In some embodiments, the retroviral nucleic acid further comprises or encodes an exogenous agent, a positive target cell-specific regulatory element, a non-target cell-specific regulatory element, or a negative TCSRE. In some embodiments, the retroviral nucleic acid comprises one or more of (e.g., all of) a 5′ LTR (e.g., to promote integration), U3 (e.g., to activate viral genomic RNA transcription), R (e.g., a Tat-binding region), U5, a 3′ LTR (e.g., to promote integration), a packaging site (e.g., psi (Ψ)), RRE (e.g., to bind to Rev and promote nuclear export). The retroviral nucleic acid can comprise RNA (e.g., when part of a virion) or DNA (e.g., when being introduced into a source cell or after reverse transcription in a recipient cell). In some embodiments, the retroviral nucleic acid is packaged using a helper cell, helper virus, or helper plasmid which comprises one or more of (e.g., all of) gag, pol, and env.

[0248] As used herein, a “target cell” refers to a cell of a type to which it is desired that a fusosome (e.g., lentiviral vector) deliver an exogenous agent. In embodiments, a target cell is a cell of a specific tissue type or class, e.g., a CNS cell, e.g., a neuron or a glial cell. In some embodiments, a target cell is a diseased cell, e.g., a cancer cell. In some embodiments, the fusogen, e.g., re-targeted fusogen (alone or in combination with the positive TCSRE, NTCSRE, negative TCSRE, or any combination thereof) leads to preferential delivery of the exogenous agent to a target cell compared to a non-target cell.

[0249] As used herein a “non-target cell” refers to a cell of a type to which it is not desired that a lentiviral vector delivers an exogenous agent. In some embodiments, a non-target cell is a cell of a specific tissue type or class. In some embodiments, a non-target cell is a non-diseased cell, e.g., a non-cancerous cell. In some embodiments, the fusogen, e.g., re-targeted fusogen (alone or in combination with the positive TCSRE, NTCSRE, negative TCSRE or any combination thereof) leads to lower delivery of the exogenous agent to a non-target cell compared to a target cell.

[0250] As used herein, the terms “treat,” “treating,” or “treatment” refer to ameliorating a disease or disorder, e.g., slowing or arresting or reducing the development of the disease or disorder, e.g., a root cause of the disorder or at least one of the clinical symptoms thereof.

[0251] As used herein, “cytobiologic” refers to a portion of a cell that comprises a lumen and a cell membrane, or a cell having partial or complete nuclear inactivation. In some embodiments, the cytobiologic comprises one or more of a cytoskeleton component, an organelle, and a ribosome. In embodiments, the cytobiologic is an enucleated cell, a microvesicle, or a cell ghost.

### II. Fusosomes, e.g., Cell-Derived Fusosomes

[0252] Fusosomes can take various forms. For example, in some embodiments, a fusosome described herein is derived from a source cell. A fusosome may be or comprise, e.g., an extracellular vesicle, a microvesicle, a nanovesicle, an exosome, an apoptotic body (from apoptotic cells), a microparticle (which may be derived from, e.g., platelets), an ectosome (derivable from, e.g., neutrophiles and monocytes in serum), a prostatosome (obtainable from prostate cancer cells), a cardiosome (derivable from cardiac cells), or any combination thereof. In some embodiments, a fusosome is released naturally from a source cell, and in some embodiments, the source cell is treated to enhance formation of fusosomes. In some embodiments, the fusosome is between about 10-10,000 nm in diameter, e.g., about 30-100 nm in diameter. In some embodiments, the fusosome comprises one or more synthetic lipids.

[0253] In some embodiments, the fusosome is or comprises a virus, e.g., a retrovirus, e.g., a lentivirus. For instance, in some embodiments, the fusosome's bilayer of amphipathic lipids is or comprises the viral envelope. The viral envelope may comprise a fusogen, e.g., a fusogen that is endogenous to the virus or a pseudotyped fusogen. In some embodiments, the fusosome's lumen or cavity comprises a viral nucleic acid, e.g., a retroviral nucleic acid, e.g., a lentiviral nucleic acid. The viral nucleic acid may be a viral genome. In some embodiments, the fusosome further comprises one or more viral non-structural proteins, e.g., in its cavity or lumen.

[0254] Fusosomes may have various properties that facilitate delivery of a payload to a target cell. For instance, in some embodiments, the fusosome and the source cell together comprise nucleic acid(s) sufficient to make a particle that can fuse with a target cell. In embodiments, these nucleic acid(s) encode proteins having one or more of (e.g., all of) the following activities: gag polyprotein activity, polymerase activity, integrase activity, protease activity, and fusogen activity.

[0255] Fusosomes may also comprise various structures that facilitate delivery of a payload to a target cell. For instance, in some embodiments, the fusosome and the source cell together comprise nucleic acid(s) sufficient to make a particle that can fuse with a target cell. In embodiments, these nucleic acid(s) encode proteins having one or more of (e.g., all of) the following activities: gag polyprotein activity, polymerase activity, integrase activity, protease activity, and fusogen activity.

[0256] Fusosomes may also comprise various structures that facilitate delivery of a payload to a target cell. For instance, in some embodiments, the fusosome (e.g., virus, e.g., retrovirus, e.g., lentivirus) comprises one or more of (e.g., all of) the following proteins: gag polyprotein, polymerase (e.g., pol), integrase (e.g., a functional or non-functional variant), protease, and a fusogen. In some embodiments, the fusosome further comprises rev. In some embodiments, one or more of the aforesaid proteins are encoded in the retroviral genome, and in some embodiments, one or more of the aforesaid proteins are provided in trans, e.g., by a helper cell, helper virus, or helper plasmid. In some embodiments, the fusosome nucleic acid (e.g., retroviral nucleic acid) comprises one or more of (e.g., all of) the following nucleic acid sequences: 5′ LTR (e.g., comprising U5 and lacking a functional U3 domain), Psi packaging element (Psi), Central polypurine tract (cPPT) Promoter operatively linked to the payload gene, payload gene (optionally comprising an intron before the open reading frame), Poly A tail sequence, WPRE, and 3′ LTR (e.g., comprising U5 and lacking a functional U3). In some embodiments the fusosome nucleic acid (e.g., retroviral nucleic acid) further comprises one or more insulator element. In some embodiments the fusosome nucleic acid (e.g., retroviral nucleic acid) further comprises one or more miRNA recognition sites. In some embodiments, one or more of the miRNA recognition sites are situated downstream of the poly A tail sequence, e.g., between the poly A tail sequence and the WPRE.

[0257] In some embodiments, a fusosome provided herein is administered to a subject, e.g., a mammal, e.g., a human. In such embodiments, the subject may be at risk of, may have a symptom of, or may be diagnosed with or identified as having, a particular disease or condition (e.g., a disease or condition described herein). In one embodiment, the subject has a genetic deficiency, such as any listed in Table 5 or Table 6. In some embodiments, the fusosome contains nucleic acid sequences encoding an exogenous agent for treating the disease or condition, such as for treating the genetic deficiency.

[0258] A. Fusosomes Generated from Viruses.

[0259] For instance, in some embodiments, the fusosome (e.g., virus, e.g., retrovirus, e.g., lentivirus) comprises one or more of (e.g., all of) the following proteins: gag polyprotein, polymerase (e.g., pol), integrase (e.g., a functional or non-functional variant), protease, and a fusogen. In some embodiments, the fusosome further comprises rev. In some embodiments, one or more of the aforesaid proteins are encoded in the retroviral genome, and in some embodiments, one or more of the aforesaid proteins are provided in trans, e.g., by a helper cell, helper virus, or helper plasmid. In some embodiments, the fusosome nucleic acid (e.g., retroviral nucleic acid) comprises one or more of (e.g., all of) the following nucleic acid sequences: 5′ LTR (e.g., comprising U5 and lacking a functional U3 domain), Psi packaging element (Psi), Central polypurine tract (cPPT) Promoter operatively linked to the payload gene, payload gene (optionally comprising an intron before the open reading frame), Poly A tail sequence, WPRE, and 3′ LTR (e.g., comprising U5 and lacking a functional U3). In some embodiments the fusosome nucleic acid (e.g., retroviral nucleic acid) further comprises one or more insulator element. In some embodiments the fusosome nucleic acid (e.g., retroviral nucleic acid) further comprises one or more miRNA recognition sites. In some embodiments, one or more of the miRNA recognition sites are situated downstream of the poly A tail sequence, e.g., between the poly A tail sequence and the WPRE.

[0260] i) Lentiviral Components and Helper Cells

[0261] In some embodiments, the retroviral nucleic acid comprises one or more of (e.g., all of): a 5′ promoter (e.g., to control expression of the entire packaged RNA), a 5′ LTR (e.g., that includes R (polyadenylation tail signal) and/or U5 which includes a primer activation signal), a primer binding site, a psi packaging signal, a RRE element for nuclear export, a promoter directly upstream of the transgene to control transgene expression, a transgene (or other exogenous agent element), a polypurine tract, and a 3′ LTR (e.g., that includes a mutated U3, a R, and U5). In some embodiments, the retroviral nucleic acid further comprises one or more of a cPPT, a WPRE, and/or an insulator element.

[0262] A retrovirus typically replicates by reverse transcription of its genomic RNA into a linear double-stranded DNA copy and subsequently covalently integrates its genomic DNA into a host genome. Illustrative retroviruses suitable for use in particular embodiments, include, but are not limited to: Moloney murine leukemia virus (M-MuLV), Moloney murine sarcoma virus (MoMSV), Harvey murine sarcoma virus (HaMuSV), murine mammary tumor virus (MuMTV), gibbon ape leukemia virus (GaLV), feline leukemia virus (FLV), spumavirus, Friend murine leukemia virus, Murine Stem Cell Virus (MSCV) and Rous Sarcoma Virus (RSV)) and lentivirus.

[0263] In some embodiments the retrovirus is a Gammretrovirus. In some embodiments the retrovirus is an Epsilonretrovirus. In some embodiments the retrovirus is an Alpharetrovirus. In some embodiments the retrovirus is a Betaretrovirus. In some embodiments the retrovirus is a Deltaretrovirus. In some embodiments the retrovirus is a Lentivirus. In some embodiments the retrovirus is a Spumaretrovirus. In some embodiments the retrovirus is an endogenous retrovirus.

[0264] Illustrative lentiviruses include, but are not limited to: HIV (human immunodeficiency virus; including HIV type 1, and HIV type 2); visna-maedi virus (VMV) virus; the caprine arthritis-encephalitis virus (CAEV); equine infectious anemia virus (EIAV); feline immunodeficiency virus (FIV); bovine immune deficiency virus (BIV); and simian immunodeficiency virus (SIV). In some embodiments, HIV based vector backbones (i.e., HIV cis-acting sequence elements) are used.

[0265] In some embodiments, a vector herein is a nucleic acid molecule capable transferring or transporting another nucleic acid molecule. The transferred nucleic acid is generally linked to, e.g., inserted into, the vector nucleic acid molecule. A vector may include sequences that direct autonomous replication in a cell, or may include sequences sufficient to allow integration into host cell DNA. Useful vectors include, for example, plasmids (e.g., DNA plasmids or RNA plasmids), transposons, cosmids, bacterial artificial chromosomes, and viral vectors. Useful viral vectors include, e.g., replication defective retroviruses and lentiviruses.

[0266] A viral vector can comprise, e.g., a nucleic acid molecule (e.g., a transfer plasmid) that includes virus-derived nucleic acid elements that typically facilitate transfer of the nucleic acid molecule or integration into the genome of a cell or to a viral particle that mediates nucleic acid transfer. Viral particles will typically include various viral components and sometimes also host cell components in addition to nucleic acid(s). A viral vector can comprise, e.g., a virus or viral particle capable of transferring a nucleic acid into a cell, or to the transferred nucleic acid (e.g., as naked DNA). Viral vectors and transfer plasmids can comprise structural and/or functional genetic elements that are primarily derived from a virus. A retroviral vector can comprise a viral vector or plasmid containing structural and functional genetic elements, or portions thereof, that are primarily derived from a retrovirus. A lentiviral vector can comprise a viral vector or plasmid containing structural and functional genetic elements, or portions thereof, including LTRs that are primarily derived from a lentivirus.

[0267] In embodiments, a lentiviral vector (e.g., lentiviral expression vector) may comprise a lentiviral transfer plasmid (e.g., as naked DNA) or an infectious lentiviral particle. With respect to elements such as cloning sites, promoters, regulatory elements, heterologous nucleic acids, etc., it is to be understood that the sequences of these elements can be present in RNA form in lentiviral particles and can be present in DNA form in DNA plasmids.

[0268] In some vectors described herein, at least part of one or more protein coding regions that contribute to or are essential for replication may be absent compared to the corresponding wild-type virus. This makes the viral vector replication-defective. In some embodiments, the vector is capable of transducing a target non-dividing host cell and/or integrating its genome into a host genome.

[0269] The structure of a wild-type retrovirus genome often comprises a 5′ long terminal repeat (LTR) and a 3′ LTR, between or within which are located a packaging signal to enable the genome to be packaged, a primer binding site, integration sites to enable integration into a host cell genome and gag, pol and env genes encoding the packaging components which promote the assembly of viral particles. More complex retroviruses have additional features, such as rev and RRE sequences in HIV, which enable the efficient export of RNA transcripts of the integrated provirus from the nucleus to the cytoplasm of an infected target cell. In the provirus, the viral genes are flanked at both ends by regions called long terminal repeats (LTRs). The LTRs are involved in proviral integration and transcription. LTRs also serve as enhancer-promoter sequences and can control the expression of the viral genes. Encapsidation of the retroviral RNAs occurs by virtue of a psi sequence located at the 5′ end of the viral genome.

[0270] The LTRs themselves are typically similar (e.g., identical) sequences that can be divided into three elements, which are called U3, R and U5. U3 is derived from the sequence unique to the 3′ end of the RNA. R is derived from a sequence repeated at both ends of the RNA and U5 is derived from the sequence unique to the 5′ end of the RNA. The sizes of the three elements can vary considerably among different retroviruses.

[0271] For the viral genome, the site of transcription initiation is typically at the boundary between U3 and R in one LTR and the site of poly (A) addition (termination) is at the boundary between R and U5 in the other LTR. U3 contains most of the transcriptional control elements of the provirus, which include the promoter and multiple enhancer sequences responsive to cellular and in some cases, viral transcriptional activator proteins. Some retroviruses comprise any one or more of the following genes that code for proteins that are involved in the regulation of gene expression: tot, rev, tax and rex.

[0272] With regard to the structural genes gag, pol and env themselves, gag encodes the internal structural protein of the virus. Gag protein is proteolytically processed into the mature proteins MA (matrix), CA (capsid) and NC (nucleocapsid). The pol gene encodes the reverse transcriptase (RT), which contains DNA polymerase, associated RNase H and integrase (IN), which mediate replication of the genome. The env gene encodes the surface (SU) glycoprotein and the transmembrane (TM) protein of the virion, which form a complex that interacts specifically with cellular receptor proteins. This interaction promotes infection, e.g., by fusion of the viral membrane with the cell membrane.

[0273] In a replication-defective retroviral vector genome gag, pol and env may be absent or not functional. The R regions at both ends of the RNA are typically repeated sequences. U5 and U3 represent unique sequences at the 5′ and 3′ ends of the RNA genome respectively.

[0274] Retroviruses may also contain additional genes which code for proteins other than gag, pol and env. Examples of additional genes include (in HIV), one or more of vif, vpr, vpx, vpu, tat, rev and nef. EIAV has (amongst others) the additional gene S2. Proteins encoded by additional genes serve various functions, some of which may be duplicative of a function provided by a cellular protein. In EIAV, for example, tat acts as a transcriptional activator of the viral LTR (Derse and Newbold 1993 Virology 194:530-6; Maury et al. 1994 Virology 200:632-42). It binds to a stable, stem-loop RNA secondary structure referred to as TAR. Rev regulates and co-ordinates the expression of viral genes through rev-response elements (RRE) (Martarano et al. 1994 J. Virol. 68:3102-11). The mechanisms of action of these two proteins are thought to be broadly similar to the analogous mechanisms in the primate viruses. In addition, an EIAV protein, Ttm, has been identified that is encoded by the first exon of tat spliced to the env coding sequence at the start of the transmembrane protein.

[0275] In addition to protease, reverse transcriptase and integrase, non-primate lentiviruses contain a fourth pol gene product which codes for a dUTPase. This may play a role in the ability of these lentiviruses to infect certain non-dividing or slowly dividing cell types.

[0276] In embodiments, a recombinant lentiviral vector (RLV) is a vector with sufficient retroviral genetic information to allow packaging of an RNA genome, in the presence of packaging components, into a viral particle capable of infecting a target cell. Infection of the target cell can comprise reverse transcription and integration into the target cell genome. The RLV typically carries non-viral coding sequences which are to be delivered by the vector to the target cell. In embodiments, an RLV is incapable of independent replication to produce infectious retroviral particles within the target cell. Usually the RLV lacks a functional gag-pol and/or env gene and/or other genes involved in replication. The vector may be configured as a split-intron vector, e.g., as described in PCT patent application WO 99/15683, which is herein incorporated by reference in its entirety.

[0277] In some embodiments, the lentiviral vector comprises a minimal viral genome, e.g., the viral vector has been manipulated so as to remove the non-essential elements and to retain the essential elements in order to provide the required functionality to infect, transduce and deliver a nucleotide sequence of interest to a target host cell, e.g., as described in WO 98/17815, which is herein incorporated by reference in its entirety.

[0278] A minimal lentiviral genome may comprise, e.g., (5′)R-U5-one or more first nucleotide sequences-U3-R(3′). However, the plasmid vector used to produce the lentiviral genome within a source cell can also include transcriptional regulatory control sequences operably linked to the lentiviral genome to direct transcription of the genome in a source cell. These regulatory sequences may comprise the natural sequences associated with the transcribed retroviral sequence, e.g., the 5′ U3 region, or they may comprise a heterologous promoter such as another viral promoter, for example the CMV promoter. Some lentiviral genomes comprise additional sequences to promote efficient virus production. For example, in the case of HIV, rev and RRE sequences may be included. Alternatively or combination, codon optimization may be used, e.g., the gene encoding the exogenous agent may be codon optimized, e.g., as described in WO 01/79518, which is herein incorporated by reference in its entirety. Alternative sequences which perform a similar or the same function as the rev/RRE system may also be used. For example, a functional analogue of the rev/RRE system is found in the Mason Pfizer monkey virus. This is known as CTE and comprises an RRE-type sequence in the genome which is believed to interact with a factor in the infected cell. The cellular factor can be thought of as a rev analogue. Thus, CTE may be used as an alternative to the rev/RRE system. In addition, the Rex protein of HTLV-I can functionally replace the Rev protein of HIV-I. Rev and Rex have similar effects to IRE-BP.

[0279] In some embodiments, a retroviral nucleic acid (e.g., a lentiviral nucleic acid, e.g., a primate or non-primate lentiviral nucleic acid) (1) comprises a deleted gag gene wherein the deletion in gag removes one or more nucleotides downstream of about nucleotide 350 or 354 of the gag coding sequence; (2) has one or more accessory genes absent from the retroviral nucleic acid; (3) lacks the tat gene but includes the leader sequence between the end of the 5′ LTR and the ATG of gag; and (4) combinations of (1), (2) and (3). In an embodiment the lentiviral vector comprises all of features (1) and (2) and (3). This strategy is described in more detail in WO 99/32646, which is herein incorporated by reference in its entirety.

[0280] In some embodiments, a primate lentivirus minimal system requires none of the HIV/SIV additional genes vif, vpr, vpx, vpu, tat, rev and nef for either vector production or for transduction of dividing and non-dividing cells. In some embodiments, an EIAV minimal vector system does not require S2 for either vector production or for transduction of dividing and non-dividing cells.

[0281] The deletion of additional genes may permit vectors to be produced without the genes associated with disease in lentiviral (e.g. HIV) infections. In particular, tat is associated with disease. Secondly, the deletion of additional genes permits the vector to package more heterologous DNA. Thirdly, genes whose function is unknown, such as S2, may be omitted, thus reducing the risk of causing undesired effects. Examples of minimal lentiviral vectors are disclosed in WO 99/32646 and in WO 98/17815.

[0282] In some embodiments, the retroviral nucleic acid is devoid of at least tat and S2 (if it is an EIAV vector system), and possibly also vif, vpr, vpx, vpu and nef. In some embodiments, the retroviral nucleic acid is also devoid of rev, RRE, or both.

[0283] In some embodiments the retroviral nucleic acid comprises vpx. The Vpx polypeptide binds to and induces the degradation of the SAMHD1 restriction factor, which degrades free dNTPs in the cytoplasm. Thus, the concentration of free dNTPs in the cytoplasm increases as Vpx degrades SAMHD1 and reverse transcription activity is increased, thus facilitating reverse transcription of the retroviral genome and integration into the target cell genome.

[0284] Different cells differ in their usage of particular codons. This codon bias corresponds to a bias in the relative abundance of particular tRNAs in the cell type. By altering the codons in the sequence so that they are tailored to match with the relative abundance of corresponding tRNAs, it is possible to increase expression. By the same token, it is possible to decrease expression by deliberately choosing codons for which the corresponding tRNAs are known to be rare in the particular cell type. Thus, an additional degree of translational control is available. An additional description of codon optimization is found, e.g., in WO 99/41397, which is herein incorporated by reference in its entirety.

[0285] Many viruses, including HIV and other lentiviruses, use a large number of rare codons and by changing these to correspond to commonly used mammalian codons, increased expression of the packaging components in mammalian producer cells can be achieved.

[0286] Codon optimization has a number of other advantages. By virtue of alterations in their sequences, the nucleotide sequences encoding the packaging components may have RNA instability sequences (INS) reduced or eliminated from them. At the same time, the amino acid sequence coding sequence for the packaging components is retained so that the viral components encoded by the sequences remain the same, or at least sufficiently similar that the function of the packaging components is not compromised. In some embodiments, codon optimization also overcomes the Rev/RRE requirement for export, rendering optimized sequences Rev independent. In some embodiments, codon optimization also reduces homologous recombination between different constructs within the vector system (for example between the regions of overlap in the gag-pol and env open reading frames). In some embodiments, codon optimization leads to an increase in viral titer and/or improved safety.

[0287] In some embodiments, only codons relating to INS are codon optimized. In other embodiments, the sequences are codon optimized in their entirety, with the exception of the sequence encompassing the frameshift site of gag-pol.

[0288] The gag-pol gene comprises two overlapping reading frames encoding the gag-pol proteins. The expression of both proteins depends on a frameshift during translation. This frameshift occurs as a result of ribosome “slippage” during translation. This slippage is thought to be caused at least in part by ribosome-stalling RNA secondary structures. Such secondary structures exist downstream of the frameshift site in the gag-pol gene. For HIV, the region of overlap extends from nucleotide 1222 downstream of the beginning of gag (wherein nucleotide 1 is the A of the gag ATG) to the end of gag (nt 1503). Consequently, a 281 bp fragment spanning the frameshift site and the overlapping region of the two reading frames is preferably not codon optimized. In some embodiments, retaining this fragment will enable more efficient expression of the gag-pol proteins. For EIAV, the beginning of the overlap is at nt 1262 (where nucleotide 1 is the A of the gag ATG). The end of the overlap is at nt 1461. In order to ensure that the frameshift site and the gag-pol overlap are preserved, the wild type sequence may be retained from nt 1156 to 1465.

[0289] Derivations from optimal codon usage may be made, for example, in order to accommodate convenient restriction sites, and conservative amino acid changes may be introduced into the gag-pol proteins.

[0290] In some embodiments, codon optimization is based on codons with poor codon usage in mammalian systems. The third and sometimes the second and third base may be changed.

[0291] Due to the degenerate nature of the genetic code, it will be appreciated that numerous gag-pol sequences can be achieved by a skilled worker. Also, there are many retroviral variants described which can be used as a starting point for generating a codon optimized gag-pol sequence. Lentiviral genomes can be quite variable. For example there are many quasi-species of HIV-I which are still functional. This is also the case for EIAV. These variants may be used to enhance particular parts of the transduction process. Examples of HIV-I variants may be found in the HIV databases maintained by Los Alamos National Laboratory. Details of EIAV clones may be found at the NCBI database maintained by the National Institutes of Health.

[0292] The strategy for codon optimized gag-pol sequences can be used in relation to any retrovirus, e.g., EIAV, FIV, BIV, CAEV, VMR, SIV, HIV-I and HIV-2. In addition this method could be used to increase expression of genes from HTLV-I, HTLV-2, HFV, HSRV and human endogenous retroviruses (HERV), MLV and other retroviruses.

[0293] As described above, the packaging components for a retroviral vector can include expression products of gag, pol and env genes. In addition, packaging can utilize a short sequence of 4 stem loops followed by a partial sequence from gag and env as a packaging signal. Thus, inclusion of a deleted gag sequence in the retroviral vector genome (in addition to the full gag sequence on the packaging construct) can be used. In embodiments, the retroviral vector comprises a packaging signal that comprises from 255 to 360 nucleotides of gag in vectors that still retain env sequences, or about 40 nucleotides of gag in a particular combination of splice donor mutation, gag and env deletions. In some embodiments, the retroviral vector includes a gag sequence which comprises one or more deletions, e.g., the gag sequence comprises about 360 nucleotides derivable from the N-terminus.

[0294] The retroviral vector, helper cell, helper virus, or helper plasmid may comprise retroviral structural and accessory proteins, for example gag, pol, env, tat, rev, vif, vpr, vpu, vpx, or nef proteins or other retroviral proteins. In some embodiments the retroviral proteins are derived from the same retrovirus. In some embodiments the retroviral proteins are derived from more than one retrovirus, e.g. 2, 3, 4, or more retroviruses.

[0295] The gag and pol coding sequences are generally organized as the Gag-Pol Precursor in native lentivirus. The gag sequence codes for a 55-kD Gag precursor protein, also called p55. The p55 is cleaved by the virally encoded protease4 (a product of the pol gene) during the process of maturation into four smaller proteins designated MA (matrix [p17]), CA (capsid [p24]), NC (nucleocapsid [p9]), and p6. The pol precursor protein is cleaved away from Gag by a virally encoded protease, and further digested to separate the protease (p10), RT (p50), RNase H (p15), and integrase (p31) activities.

[0296] Native Gag-Pol sequences can be utilized in a helper vector (e.g., helper plasmid or helper virus), or modifications can be made. These modifications include, chimeric Gag-Pol, where the Gag and Pol sequences are obtained from different viruses (e.g., different species, subspecies, strains, clades, etc.), and/or where the sequences have been modified to improve transcription and/or translation, and/or reduce recombination.

[0297] In various examples, the retroviral nucleic acid includes a polynucleotide encoding a 150-250 (e.g., 168) nucleotide portion of a gag protein that (i) includes a mutated INS1 inhibitory sequence that reduces restriction of nuclear export of RNA relative to wild-type INS1, (ii) contains two nucleotide insertion that results in frame shift and premature termination, and/or (iii) does not include INS2, INS3, and INS4 inhibitory sequences of gag.

[0298] In some embodiments, a vector described herein is a hybrid vector that comprises both retroviral (e.g., lentiviral) sequences and non-lentiviral viral sequences. In some embodiments, a hybrid vector comprises retroviral e.g., lentiviral, sequences for reverse transcription, replication, integration and/or packaging.

[0299] According to certain specific embodiments, most or all of the viral vector backbone sequences are derived from a lentivirus, e.g., HIV-1. However, it is to be understood that many different sources of retroviral and/or lentiviral sequences can be used, or combined and numerous substitutions and alterations in certain of the lentiviral sequences may be accommodated without impairing the ability of a transfer vector to perform the functions described herein. A variety of lentiviral vectors are described in Naldini et al., (1996a, 1996b, and 1998); Zufferey et al., (1997); Dull et al., 1998, U.S. Pat. Nos. 6,013,516; and 5,994,136, many of which may be adapted to produce a retroviral nucleic acid.

[0300] At each end of the provirus, long terminal repeats (LTRs) are typically found. An LTR typically comprises a domain located at the ends of retroviral nucleic acid which, in their natural sequence context, are direct repeats and contain U3, R and U5 regions. LTRs generally promote the expression of retroviral genes (e.g., promotion, initiation and polyadenylation of gene transcripts) and viral replication. The LTR can comprise numerous regulatory signals including transcriptional control elements, polyadenylation signals and sequences for replication and integration of the viral genome. The viral LTR is typically divided into three regions called U3, R and U5. The U3 region typically contains the enhancer and promoter elements. The U5 region is typically the sequence between the primer binding site and the R region and can contain the polyadenylation sequence. The R (repeat) region can be flanked by the U3 and U5 regions. The LTR is typically composed of U3, R and U5 regions and can appear at both the 5′ and 3′ ends of the viral genome. In some embodiments, adjacent to the 5′ LTR are sequences for reverse transcription of the genome (the tRNA primer binding site) and for efficient packaging of viral RNA into particles (the Psi site).

[0301] A packaging signal can comprise a sequence located within the retroviral genome which mediate insertion of the viral RNA into the viral capsid or particle, see e.g., Clever et al., 1995. J. of Virology, Vol. 69, No. 4; pp. 2101-2109. Several retroviral vectors use a minimal packaging signal (a psi [Ψ] sequence) for encapsidation of the viral genome.

[0302] In various embodiments, retroviral nucleic acids comprise modified 5′ LTR and/or 3′ LTRs. Either or both of the LTR may comprise one or more modifications including, but not limited to, one or more deletions, insertions, or substitutions. Modifications of the 3′ LTR are often made to improve the safety of lentiviral or retroviral systems by rendering viruses replication-defective, e.g., virus that is not capable of complete, effective replication such that infective virions are not produced (e.g., replication-defective lentiviral progeny).

[0303] In some embodiments, a vector is a self-inactivating (SIN) vector, e.g., replication-defective vector, e.g., retroviral or lentiviral vector, in which the right (3′) LTR enhancer-promoter region, known as the U3 region, has been modified (e.g., by deletion or substitution) to prevent viral transcription beyond the first round of viral replication. This is because the right (3′) LTR U3 region can be used as a template for the left (5′) LTR U3 region during viral replication and, thus, absence of the U3 enhancer-promoter inhibits viral replication. In embodiments, the 3′ LTR is modified such that the U5 region is removed, altered, or replaced, for example, with an exogenous poly(A) sequence The 3′ LTR, the 5′ LTR, or both 3′ and 5′ LTRs, may be modified LTRs.

[0304] In some embodiments, the U3 region of the 5′ LTR is replaced with a heterologous promoter to drive transcription of the viral genome during production of viral particles. Examples of heterologous promoters which can be used include, for example, viral simian virus 40 (SV40) (e.g., early or late), cytomegalovirus (CMV) (e.g., immediate early), Moloney murine leukemia virus (MoMLV), Rous sarcoma virus (RSV), and herpes simplex virus (HSV) (thymidine kinase) promoters. In some embodiments, promoters are able to drive high levels of transcription in a Tat-independent manner. In certain embodiments, the heterologous promoter has additional advantages in controlling the manner in which the viral genome is transcribed. For example, the heterologous promoter can be inducible, such that transcription of all or part of the viral genome will occur only when the induction factors are present. Induction factors include, but are not limited to, one or more chemical compounds or the physiological conditions such as temperature or pH, in which the host cells are cultured.

[0305] In some embodiments, viral vectors comprise a TAR (trans-activation response) element, e.g., located in the R region of lentiviral (e.g., HIV) LTRs. This element interacts with the lentiviral trans-activator (tat) genetic element to enhance viral replication. However, this element is not required, e.g., in embodiments wherein the U3 region of the 5′ LTR is replaced by a heterologous promoter.

[0306] The R region, e.g., the region within retroviral LTRs beginning at the start of the capping group (i.e., the start of transcription) and ending immediately prior to the start of the poly A tract can be flanked by the U3 and U5 regions. The R region plays a role during reverse transcription in the transfer of nascent DNA from one end of the genome to the other.

[0307] The retroviral nucleic acid can also comprise a FLAP element, e.g., a nucleic acid whose sequence includes the central polypurine tract and central termination sequences (cPPT and CTS) of a retrovirus, e.g., HIV-1 or HIV-2. Suitable FLAP elements are described in U.S. Pat. No. 6,682,907 and in Zennou, et al., 2000, Cell, 101:173, which are herein incorporated by reference in their entireties. During HIV-1 reverse transcription, central initiation of the plus-strand DNA at the central polypurine tract (cPPT) and central termination at the central termination sequence (CTS) can lead to the formation of a three-stranded DNA structure: the HIV-1 central DNA flap. In some embodiments, the retroviral or lentiviral vector backbones comprise one or more FLAP elements upstream or downstream of the gene encoding the exogenous agent. For example, in some embodiments a transfer plasmid includes a FLAP element, e.g., a FLAP element derived or isolated from HIV-1.

[0308] In embodiments, a retroviral or lentiviral nucleic acid comprises one or more export elements, e.g., a cis-acting post-transcriptional regulatory element which regulates the transport of an RNA transcript from the nucleus to the cytoplasm of a cell. Examples of RNA export elements include, but are not limited to, the human immunodeficiency virus (HIV) rev response element (RRE) (see e.g., Cullen et al., 1991. J. Virol. 65: 1053; and Cullen et al., 1991. Cell 58: 423), and the hepatitis B virus post-transcriptional regulatory element (HPRE), which are herein incorporated by reference in their entireties. Generally, the RNA export element is placed within the 3′ UTR of a gene, and can be inserted as one or multiple copies.

[0309] In some embodiments, expression of heterologous sequences in viral vectors is increased by incorporating one or more of, e.g., all of, posttranscriptional regulatory elements, polyadenylation sites, and transcription termination signals into the vectors. A variety of posttranscriptional regulatory elements can increase expression of a heterologous nucleic acid at the protein, e.g., woodchuck hepatitis virus posttranscriptional regulatory element (WPRE; Zufferey et al., 1999, J. Virol., 73:2886); the posttranscriptional regulatory element present in hepatitis B virus (HPRE) (Huang et al., Mol. Cell. Biol., 5:3864); and the like (Liu et al., 1995, Genes Dev., 9:1766), each of which is herein incorporated by reference in its entirety. In some embodiments, a retroviral nucleic acid described herein comprises a posttranscriptional regulatory element such as a WPRE or HPRE

[0310] In some embodiments, a retroviral nucleic acid described herein lacks or does not comprise a posttranscriptional regulatory element such as a WPRE or HPRE.

[0311] Elements directing the termination and polyadenylation of the heterologous nucleic acid transcripts may be included, e.g., to increases expression of the exogenous agent. Transcription termination signals may be found downstream of the polyadenylation signal. In some embodiments, vectors comprise a polyadenylation sequence 3′ of a polynucleotide encoding the exogenous agent. A polyA site may comprise a DNA sequence which directs both the termination and polyadenylation of the nascent RNA transcript by RNA polymerase II. Polyadenylation sequences can promote mRNA stability by addition of a polyA tail to the 3′ end of the coding sequence and thus, contribute to increased translational efficiency. Illustrative examples of polyA signals that can be used in a retroviral nucleic acid, include AATAAA, ATTAAA, AGTAAA, a bovine growth hormone polyA sequence (BGHpA), a rabbit β-globin polyA sequence (rβgpA), or another suitable heterologous or endogenous polyA sequence.

[0312] In some embodiments, a retroviral or lentiviral vector further comprises one or more insulator elements, e.g., an insulator element described herein.

[0313] In various embodiments, the vectors comprise a promoter operably linked to a polynucleotide encoding an exogenous agent. The vectors may have one or more LTRs, wherein either LTR comprises one or more modifications, such as one or more nucleotide substitutions, additions, or deletions. The vectors may further comprise one of more accessory elements to increase transduction efficiency (e.g., a cPPT/FLAP), viral packaging (e.g., a Psi (Ψ) packaging signal, RRE), and/or other elements that increase exogenous gene expression (e.g., poly (A) sequences), and may optionally comprise a WPRE or HPRE.

[0314] In some embodiments, a lentiviral nucleic acid comprises one or more of, e.g., all of, e.g., from 5′ to 3′, a promoter (e.g., CMV), an R sequence (e.g., comprising TAR), a U5 sequence (e.g., for integration), a PBS sequence (e.g., for reverse transcription), a DIS sequence (e.g., for genome dimerization), a psi packaging signal, a partial gag sequence, an RRE sequence (e.g., for nuclear export), a cPPT sequence (e.g., for nuclear import), a promoter to drive expression of the exogenous agent, a gene encoding the exogenous agent, a WPRE sequence (e.g., for efficient transgene expression), a PPT sequence (e.g., for reverse transcription), an R sequence (e.g., for polyadenylation and termination), and a U5 signal (e.g., for integration).

[0315] ii) Vectors Engineered to Remove Splice Sites

[0316] Some lentiviral vectors integrate inside active genes and possess strong splicing and polyadenylation signals that could lead to the formation of aberrant and possibly truncated transcripts.

[0317] Mechanisms of proto-oncogene activation may involve the generation of chimeric transcripts originating from the interaction of promoter elements or splice sites contained in the genome of the insertional mutagen with the cellular transcriptional unit targeted by integration (Gabriel et al. 2009. Nat Med 15: 1431-1436; Bokhoven, et al. J Virol 83:283-29). Chimeric fusion transcripts comprising vector sequences and cellular mRNAs can be generated either by read-through transcription starting from vector sequences and proceeding into the flanking cellular genes, or vice versa.

[0318] In some embodiments, a lentiviral nucleic acid described herein comprises a lentiviral backbone in which at least two of the splice sites have been eliminated, e.g., to improve the safety profile of the lentiviral vector. Species of such splice sites and methods of identification are described in WO2012156839A2, all of which is included by reference.

[0319] iii) Retroviral Production Methods

[0320] Large scale viral particle production is often useful to achieve a desired viral titer. Viral particles can be produced by transfecting a transfer vector into a packaging cell line that comprises viral structural and/or accessory genes, e.g., gag, pol, env, tat, rev, vif, vpr, vpu, vpx, or nef genes or other retroviral genes.

[0321] In embodiments, the packaging vector is an expression vector or viral vector that lacks a packaging signal and comprises a polynucleotide encoding one, two, three, four or more viral structural and/or accessory genes. Typically, the packaging vectors are included in a packaging cell, and are introduced into the cell via transfection, transduction or infection. A retroviral, e.g., lentiviral, transfer vector can be introduced into a packaging cell line, via transfection, transduction or infection, to generate a source cell or cell line. The packaging vectors can be introduced into human cells or cell lines by standard methods including, e.g., calcium phosphate transfection, lipofection or electroporation. In some embodiments, the packaging vectors are introduced into the cells together with a dominant selectable marker, such as neomycin, hygromycin, puromycin, blastocidin, zeocin, thymidine kinase, DHFR, Gln synthetase or ADA, followed by selection in the presence of the appropriate drug and isolation of clones. A selectable marker gene can be linked physically to genes encoding by the packaging vector, e.g., by IRES or self cleaving viral peptides.

[0322] Packaging cell lines include cell lines that do not contain a packaging signal, but do stably or transiently express viral structural proteins and replication enzymes (e.g., gag, pol and env) which can package viral particles. Any suitable cell line can be employed, e.g., mammalian cells, e.g., human cells. Suitable cell lines which can be used include, for example, CHO cells, BHK cells, MDCK cells, C3H 10T1/2 cells, FLY cells, Psi-2 cells, BOSC 23 cells, PA317 cells, WEHI cells, COS cells, BSC 1 cells, BSC 40 cells, BMT 10 cells, VERO cells, W138 cells, MRCS cells, A549 cells, HT1080 cells, 293 cells, 293T cells, B-50 cells, 3T3 cells, NIH3T3 cells, HepG2 cells, Saos-2 cells, Huh? cells, HeLa cells, W163 cells, 211 cells, and 211A cells. In embodiments, the packaging cells are 293 cells, 293T cells, or A549 cells.

[0323] A source cell line includes a cell line which is capable of producing recombinant retroviral particles, comprising a packaging cell line and a transfer vector construct comprising a packaging signal. Methods of preparing viral stock solutions are illustrated by, e.g., Y. Soneoka et al. (1995) Nucl. Acids Res. 23:628-633, and N. R. Landau et al. (1992) J. Virol. 66:5110-5113, which are incorporated herein by reference. Infectious virus particles may be collected from the packaging cells, e.g., by cell lysis, or collection of the supernatant of the cell culture. Optionally, the collected virus particles may be enriched or purified.

[0324] iv) Packaging Plasmids and Cell Lines

[0325] In some embodiments, the source cell comprises one or more plasmids coding for viral structural proteins and replication enzymes (e.g., gag, pol and env) which can package viral particles. In some embodiments, the sequences coding for at least two of the gag, pol, and env precursors are on the same plasmid. In some embodiments, the sequences coding for the gag, pol, and env precursors are on different plasmids. In some embodiments, the sequences coding for the gag, pol, and env precursors have the same expression signal, e.g., promoter. In some embodiments, the sequences coding for the gag, pol, and env precursors have a different expression signal, e.g., different promoters. In some embodiments, expression of the gag, pol, and env precursors is inducible. In some embodiments, the plasmids coding for viral structural proteins and replication enzymes are transfected at the same time or at different times. In some embodiments, the plasmids coding for viral structural proteins and replication enzymes are transfected at the same time or at a different time from the packaging vector.

[0326] In some embodiments, the source cell line comprises one or more stably integrated viral structural genes. In some embodiments expression of the stably integrated viral structural genes is inducible.

[0327] In some embodiments, expression of the viral structural genes is regulated at the transcriptional level. In some embodiments, expression of the viral structural genes is regulated at the translational level. In some embodiments, expression of the viral structural genes is regulated at the post-translational level.

[0328] In some embodiments, expression of the viral structural genes is regulated by a tetracycline (Tet)-dependent system, in which a Tet-regulated transcriptional repressor (Tet-R) binds to DNA sequences included in a promoter and represses transcription by steric hindrance (Yao et al, 1998; Jones et al, 2005). Upon addition of doxycycline (dox), Tet-R is released, allowing transcription. Multiple other suitable transcriptional regulatory promoters, transcription factors, and small molecule inducers are suitable to regulate transcription of viral structural genes.

[0329] In some embodiments, the third-generation lentivirus components, human immunodeficiency virus type 1 (HIV) Rev, Gag/Pol, and an envelope under the control of Tet-regulated promoters and coupled with antibiotic resistance cassettes are separately integrated into the source cell genome. In some embodiments the source cell only has one copy of each of Rev, Gag/Pol, and an envelope protein integrated into the genome.

[0330] In some embodiments a nucleic acid encoding the exogenous agent (e.g., a retroviral nucleic acid encoding the exogenous agent) is also integrated into the source cell genome. In some embodiments a nucleic acid encoding the exogenous agent is maintained episomally. In some embodiments a nucleic acid encoding the exogenous agent is transfected into the source cell that has stably integrated Rev, Gag/Pol, and an envelope protein in the genome. See, e.g., Milani et al. EMBO Molecular Medicine, 2017, which is herein incorporated by reference in its entirety.

[0331] In some embodiments, a retroviral nucleic acid described herein is unable to undergo reverse transcription. Such a nucleic acid, in embodiments, is able to transiently express an exogenous agent. The retrovirus or VLP, may comprise a disabled reverse transcriptase protein, or may not comprise a reverse transcriptase protein. In embodiments, the retroviral nucleic acid comprises a disabled primer binding site (PBS) and/or att site. In embodiments, one or more viral accessory genes, including rev, tat, vif, nef, vpr, vpu, vpx and S2 or functional equivalents thereof, are disabled or absent from the retroviral nucleic acid. In embodiments, one or more accessory genes selected from S2, rev and tat are disabled or absent from the retroviral nucleic acid.

[0332] v) Strategies for Packaging a Retroviral Nucleic Acid

[0333] Typically, modern retroviral vector systems consist of viral genomes bearing cis-acting vector sequences for transcription, reverse-transcription, integration, translation and packaging of viral RNA into the viral particles, and (2) producer cells lines which express the trans-acting retroviral gene sequences (e.g., gag, pol and env) needed for production of virus particles. By separating the cis-and trans-acting vector sequences completely, the virus is unable to maintain replication for more than one cycle of infection. Generation of live virus can be avoided by a number of strategies, e.g., by minimizing the overlap between the cis-and trans-acting sequences to avoid recombination.

[0334] A viral vector particle which comprises a sequence that is devoid of or lacking viral RNA may be the result of removing or eliminating the viral RNA from the sequence. In one embodiment this may be achieved by using an endogenous packaging signal binding site on gag. Alternatively, the endogenous packaging signal binding site is on pol. In this embodiment, the RNA which is to be delivered will contain a cognate packaging signal. In another embodiment, a heterologous binding domain (which is heterologous to gag) located on the RNA to be delivered, and a cognate binding site located on gag or pol, can be used to ensure packaging of the RNA to be delivered. The heterologous sequence could be non-viral or it could be viral, in which case it may be derived from a different virus. The vector particles could be used to deliver therapeutic RNA, in which case functional integrase and/or reverse transcriptase is not required. These vector particles could also be used to deliver a therapeutic gene of interest, in which case pol is typically included.

[0335] In an embodiment, gag-pol are altered, and the packaging signal is replaced with a corresponding packaging signal. In this embodiment, the particle can package the RNA with the new packaging signal. The advantage of this approach is that it is possible to package an RNA sequence which is devoid of viral sequence for example, RNAi.

[0336] An alternative approach is to rely on over-expression of the RNA to be packaged. In one embodiment the RNA to be packaged is over-expressed in the absence of any RNA containing a packaging signal. This may result in a significant level of therapeutic RNA being packaged, and that this amount is sufficient to transduce a cell and have a biological effect.

[0337] In some embodiments, a polynucleotide comprises a nucleotide sequence encoding a viral gag protein or retroviral gag and pol proteins, wherein the gag protein or pol protein comprises a heterologous RNA binding domain capable of recognising a corresponding sequence in an RNA sequence to facilitate packaging of the RNA sequence into a viral vector particle.

[0338] In some embodiments, the heterologous RNA binding domain comprises an RNA binding domain derived from a bacteriophage coat protein, a Rev protein, a protein of the U1 small nuclear ribonucleoprotein particle, a Nova protein, a TF111A protein, a TIS11 protein, a trp RNA-binding attenuation protein (TRAP) or a pseudouridine synthase.

[0339] In some embodiments, a method herein comprises detecting or confirming the absence of replication competent retrovirus. The methods may include assessing RNA levels of one or more target genes, such as viral genes, e.g. structural or packaging genes, from which gene products are expressed in certain cells infected with a replication-competent retrovirus, such as a gammaretrovirus or lentivirus, but not present in a viral vector used to transduce cells with a heterologous nucleic acid and not, or not expected to be, present and/or expressed in cells not containing replication-competent retrovirus. Replication competent retrovirus may be determined to be present if RNA levels of the one or more target genes is higher than a reference value, which can be measured directly or indirectly, e.g. from a positive control sample containing the target gene. For further disclosure, see WO2018023094A1.

[0340] vi) Repression of a Gene Encoding an Exogenous Agent in a Source Cell

[0341] (Over-)expressed protein in the source cell may have an indirect or direct effect on vector virion assembly and/or infectivity. Incorporation of the exogenous agent into vector virions may also impact downstream processing of vector particles.

[0342] In some embodiments, a tissue-specific promoter is used to limit expression of the exogenous agent in source cells. In some embodiments, a heterologous translation control system is used in eukaryotic cell cultures to repress the translation of the exogenous agent in source cells. More specifically, the retroviral nucleic acid may comprise a binding site operably linked to the gene encoding the exogenous agent, wherein the binding site is capable of interacting with an RNA-binding protein such that translation of the exogenous agent is repressed or prevented in the source cell.

[0343] In some embodiments, the RNA-binding protein is tryptophan RNA-binding attenuation protein (TRAP), for example bacterial tryptophan RNA-binding attenuation protein. The use of an RNA-binding protein (e.g. the bacterial trp operon regulator protein, tryptophan RNA-binding attenuation protein, TRAP), and RNA targets to which it binds, will repress or prevent transgene translation within a source cell. This system is referred to as the Transgene Repression In vector Production cell system or TRIP system.

[0344] In embodiments, the placement of a binding site for an RNA binding protein (e.g., a TRAP-binding sequence, tbs) upstream of the NOI translation initiation codon allows specific repression of translation of mRNA derived from the internal expression cassette, while having no detrimental effect on production or stability of vector RNA. The number of nucleotides between the tbs and translation initiation codon of the gene encoding the exogenous agent may be varied from 0 to 12 nucleotides. The tbs may be placed downstream of an internal ribosome entry site (IRES) to repress translation of the gene encoding the exogenous agent in a multicistronic mRNA.

[0345] vii) Kill Switch Systems and Amplification

[0346] In some embodiments, a polynucleotide or cell harboring the gene encoding the exogenous agent utilizes a suicide gene, e.g., an inducible suicide gene, to reduce the risk of direct toxicity and/or uncontrolled proliferation. In specific aspects, the suicide gene is not immunogenic to the host cell harboring the exogenous agent. Examples of suicide genes include caspase-9, caspase-8, or cytosine deaminase. Caspase-9 can be activated using a specific chemical inducer of dimerization (CID).

[0347] In certain embodiments, vectors comprise gene segments that cause target cells, e.g., immune effector cells, e.g., T cells, to be susceptible to negative selection in vivo. For instance, the transduced cell can be eliminated as a result of a change in the in vivo condition of the individual. The negative selectable phenotype may result from the insertion of a gene that confers sensitivity to an administered agent, for example, a compound. Negative selectable genes are known in the art, and include, inter alia the following: the Herpes simplex virus type I thymidine kinase (HSV-I TK) gene (Wigler et al., Cell 11:223, 1977) which confers ganciclovir sensitivity; the cellular hypoxanthine phosphribosyltransferase (HPRT) gene, the cellular adenine phosphoribosyltransferase (APRT) gene, and bacterial cytosine deaminase, (Mullen et al., Proc. Natl. Acad. Sci. USA. 89:33 (1992)).

[0348] In some embodiments, transduced cells, e.g., immune effector cells, such as T cells, comprise a polynucleotide further comprising a positive marker that enables the selection of cells of the negative selectable phenotype in vitro. The positive selectable marker may be a gene which, upon being introduced into the target cell, expresses a dominant phenotype permitting positive selection of cells carrying the gene. Genes of this type include, inter alia, hygromycin-B phosphotransferase gene (hph) which confers resistance to hygromycin B, the amino glycoside phosphotransferase gene (neo or aph) from Tn5 which codes for resistance to the antibiotic G418, the dihydrofolate reductase (DHFR) gene, the adenosine deaminase gene (ADA), and the multi-drug resistance (MDR) gene.

[0349] In some embodiments, the positive selectable marker and the negative selectable element are linked such that loss of the negative selectable element necessarily also is accompanied by loss of the positive selectable marker. For instance, the positive and negative selectable markers can be fused so that loss of one obligatorily leads to loss of the other. An example of a fused polynucleotide that yields as an expression product a polypeptide that confers both the desired positive and negative selection features described above is a hygromycin phosphotransferase thymidine kinase fusion gene (HyTK). Expression of this gene yields a polypeptide that confers hygromycin B resistance for positive selection in vitro, and ganciclovir sensitivity for negative selection in vivo. See Lupton S. D., et al, Mol. and Cell. Biology 1 1:3374-3378, 1991. In addition, in embodiments, the polynucleotides encoding the chimeric receptors are in retroviral vectors containing the fused gene, particularly those that confer hygromycin B resistance for positive selection in vitro, and ganciclovir sensitivity for negative selection in vivo, for example the HyTK retroviral vector described in Lupton, S. D. et al. (1991), supra. See also the publications of PCT U591/08442 and PCT/U594/05601, describing the use of bifunctional selectable fusion genes derived from fusing dominant positive selectable markers with negative selectable markers.

[0350] Suitable positive selectable markers can be derived from genes selected from the group consisting of hph, nco, and gpt, and suitable negative selectable markers can be derived from genes selected from the group consisting of cytosine deaminase, HSV-I TK, VZV TK, HPRT, APRT and gpt. Other suitable markers are bifunctional selectable fusion genes wherein the positive selectable marker is derived from hph or neo, and the negative selectable marker is derived from cytosine deaminase or a TK gene or selectable marker.

[0351] viii) Strategies for Regulating Lentiviral Integration

[0352] Retroviral and lentiviral nucleic acids are disclosed which are lacking or disabled in key proteins/sequences so as to prevent integration of the retroviral or lentiviral genome into the target cell genome. For instance, viral nucleic acids lacking each of the amino acids making up the highly conserved DDE motif (Engelman and Craigie (1992) J. Virol. 66:6361-6369; Johnson et al. (1986) Proc. Natl. Acad. Sci. USA 83:7648-7652; Khan et al. (1991) Nucleic Acids Res. 19:851-860) of retroviral integrase enables the production of integration defective retroviral nucleic acids.

[0353] For instance, in some embodiments, a retroviral nucleic acid herein comprises a lentiviral integrase comprising a mutation that causes said integrase to be unable to catalyze the integration of the viral genome into a cell genome. In some embodiments, said mutations are type I mutations which affect directly the integration, or type II mutations which trigger pleiotropic defects affecting virion morphogenesis and/or reverse transcription. Illustrative non-limitative examples of type I mutations are those mutations affecting any of the three residues that participate in the catalytic core domain of the integrase: DX₃₉₋₅₈DX₃₅E (D64, D116 and E152 residues of the integrase of the HIV-1). In a particular embodiment, the mutation that causes said integrase to be unable to catalyze the integration of the viral genome into a cell genome is the substitution of one or more amino acid residues of the DDE motif of the catalytic core domain of the integrase, preferably the substitution of the first aspartic residue of said DEE motif by an asparagine residue. In some embodiment the retroviral vector does not comprise an integrase protein.

[0354] In some embodiments the retrovirus integrates into active transcription units. In some embodiments the retrovirus does not integrate near transcriptional start sites, the 5′ end of genes, or DNAse1 cleavage sites. In some embodiments the retrovirus integration does not active proto-oncogenes or inactive tumor suppressor genes. In some embodiments the retrovirus is not genotoxic. In some embodiments the lentivirus integrates into introns.

[0355] In some embodiments, the retroviral nucleic acid integrates into the genome of a target cell with a particular copy number. The average copy number may be determined from single cells, a population of cells, or individual cell colonies. Exemplary methods for determining copy number include polymerase chain reaction (PCR) and flow cytometry.

[0356] In some embodiments DNA encoding the exogenous agent is integrated into the genome. In some embodiments DNA encoding the exogenous agent is maintained episomally. In some embodiments the ratio of integrated to episomal DNA encoding the exogenous agent is at least 0.01, 0.1, 0.5, 1.0, 2, 5, 10, 100.

[0357] In some embodiments DNA encoding the exogenous agent is linear. In some embodiments DNA encoding the exogenous agent is circular. In some embodiments the ratio of linear to circular copies of DNA encoding the exogenous agent is at least 0.01, 0.1, 0.5, 1.0, 2, 5, 10, 100.

[0358] In embodiments the DNA encoding the exogenous agent is circular with 1 LTR. In some embodiments the DNA encoding the exogenous agent is circular with 2 LTRs. In some embodiments the ratio of circular, 1 LTR-comprising DNA encoding the exogenous agent to circular, 2 LTR-comprising DNA encoding the exogenous agent is at least 0.1, 0.5, 1.0, 2, 5, 10, 20, 50, 100.

[0359] ix) Maintenance of an Episomal Virus

[0360] In retroviruses deficient in integration, circular cDNA off-products of the retrotranscription (e.g., 1-LTR and 2-LTR) can accumulate in the cell nucleus without integrating into the host genome (see Yáñez-Muñoz R J et al., Nat. Med. 2006, 12: 348-353). Like other exogenous DNA those intermediates can then integrate in the cellular DNA at equal frequencies (e.g., 10³ to 10⁵/cell).

[0361] In some embodiments, episomal retroviral nucleic acid does not replicate. Episomal virus DNA can be modified to be maintained in replicating cells through the inclusion of eukaryotic origin of replication and a scaffold/matrix attachment region (S/MAR) for association with the nuclear matrix.

[0362] Thus, in some embodiments, a retroviral nucleic acid described herein comprises a eukaryotic origin of replication or a variant thereof. Examples of eukaryotic origins of replication of interest are the origin of replication of the β-globin gene as have been described by Aladjem et al (Science, 1995, 270: 815-819), a consensus sequence from autonomously replicating sequences associated with alpha-satellite sequences isolated previously from monkey CV-1 cells and human skin fibroblasts as has been described by Price et al Journal of Biological Chemistry, 2003, 278 (22): 19649-59, the origin of replication of the human c-myc promoter region has have been described by McWinney and Leffak (McWinney C. and Leffak M., Nucleic Acid Research 1990, 18(5): 1233-42). In embodiments, the variant substantially maintains the ability to initiate the replication in eukaryotes. The ability of a particular sequence of initiating replication can be determined by any suitable method, for example, the autonomous replication assay based on bromodeoxyuridine incorporation and density shift (Araujo F. D. et al., supra; Frappier L. et al., supra).

[0363] In some embodiments, the retroviral nucleic acid comprises a scaffold/matrix attachment region (S/MAR) or variant thereof, e.g., a non-consensus-like AT-rich DNA element several hundred base pairs in length, which organizes the nuclear DNA of the eukaryotic genome into chromatin domains, by periodic attachment to the protein scaffold or matrix of the cell nucleus. They are typically found in non-coding regions such as flanking regions, chromatin border regions, and introns. Examples of S/MAR regions are 1.8 kbp S/MAR of the human IFN-γ gene (hIFN-γ^{large}) as described by Bode et al (Bode J. et al., Science, 1992, 255: 195-7), the 0.7 Kbp minimal region of the S/MAR of the human IFN-γ gene (hIFN-γ^{short}) as has have been described by Ramezani (Ramezani A. et al., Blood 2003, 101: 4717-24), the 0.2 Kbp minimal region of the S/MAR of the human dehydrofolate reductase gene (hDHFR) as has been described by Mesner L. D. et al., Proc Natl Acad Sci USA, 2003, 100: 3281-86). In embodiments, the functionally equivalent variant of the S/MAR is a sequence selected based on the set six rules that together or alone have been suggested to contribute to S/MAR function (Kramer et al (1996) Genomics 33, 305; Singh et al (1997) Nucl. Acids Res 25, 1419). These rules have been merged into the MAR-Wiz computer program freely available at genomecluster.secs.oakland.edu/MAR-Wiz. In embodiments, the variant substantially maintains the same functions of the S/MAR from which it derives, in particular, the ability to specifically bind to the nuclear the matrix. The skilled person can determine if a particular variant is able to specifically bind to the nuclear matrix, for example by the in vitro or in vivo MAR assays described by Mesner et al. (Mesner L. D. et al, supra). In some embodiments, a specific sequence is a variant of a S/MAR if the particular variant shows propensity for DNA strand separation. This property can be determined using a specific program based on methods from equilibrium statistical mechanics. The stress-induced duplex destabilization (SIDD) analysis technique “[ . . . ] calculates the extent to which the imposed level of superhelical stress decreases the free energy needed to open the duplex at each position along a DNA sequence. The results are displayed as an SIDD profile, in which sites of strong destabilization appear as deep minima [ . . . ]” as defined in Bode et al (2005) J. Mol. Biol. 358,597. The SIDD algorithm and the mathematical basis (Bi and Benham (2004) Bioinformatics 20, 1477) and the analysis of the SIDD profile can be performed using the freely available internet resource at WebSIDD (www.genomecenter.ucdavis.edu/benham). Accordingly, in some embodiment, the polynucleotide is considered a variant of the S/MAR sequence if it shows a similar SIDD profile as the S/MAR.

[0364] B. Cell-Derived Fusosomes

[0365] Compositions of fusosomes may be generated from cells in culture, for example cultured mammalian cells, e.g., cultured human cells. The cells may be progenitor cells or non-progenitor (e.g., differentiated) cells. The cells may be primary cells or cell lines (e.g., a mammalian, e.g., human, cell line described herein). In embodiments, the cultured cells are progenitor cells, e.g., bone marrow stromal cells, marrow derived adult progenitor cells (MAPCs), endothelial progenitor cells (EPC), blast cells, intermediate progenitor cells formed in the subventricular zone, neural stem cells, muscle stem cells, satellite cells, liver stem cells, hematopoietic stem cells, bone marrow stromal cells, epidermal stem cells, embryonic stem cells, mesenchymal stem cells, umbilical cord stem cells, precursor cells, muscle precursor cells, myoblast, cardiomyoblast, neural precursor cells, glial precursor cells, neuronal precursor cells, hepatoblasts.

[0366] In some embodiments, the source cell is an endothelial cell, a fibroblast, a blood cell (e.g., a macrophage, a neutrophil, a granulocyte, a leukocyte), a stem cell (e.g., a mesenchymal stem cell, an umbilical cord stem cell, bone marrow stem cell, a hematopoietic stem cell, an induced pluripotent stem cell e.g., an induced pluripotent stem cell derived from a subject's cells), an embryonic stem cell (e.g., a stem cell from embryonic yolk sac, placenta, umbilical cord, fetal skin, adolescent skin, blood, bone marrow, adipose tissue, erythropoietic tissue, hematopoietic tissue), a myoblast, a parenchymal cell (e.g., hepatocyte), an alveolar cell, a neuron (e.g., a retinal neuronal cell) a precursor cell (e.g., a retinal precursor cell, a myeloblast, myeloid precursor cells, a thymocyte, a meiocyte, a megakaryoblast, a promegakaryoblast, a melanoblast, a lymphoblast, a bone marrow precursor cell, a normoblast, or an angioblast), a progenitor cell (e.g., a cardiac progenitor cell, a satellite cell, a radial glial cell, a bone marrow stromal cell, a pancreatic progenitor cell, an endothelial progenitor cell, a blast cell), or an immortalized cell (e.g., HeLa, HEK293, HFF-1, MRC-5, WI-38, IMR 90, IMR 91, PER.C6, HT-1080, or BJ cell).

[0367] The cultured cells may be from epithelial, connective, muscular, or nervous tissue or cells, and combinations thereof. Fusosome can be generated from cultured cells from any eukaryotic (e.g., mammalian) organ system, for example, from the cardiovascular system (heart, vasculature); digestive system (esophagus, stomach, liver, gallbladder, pancreas, intestines, colon, rectum and anus); endocrine system (hypothalamus, pituitary gland, pineal body or pineal gland, thyroid, parathyroids, adrenal glands); excretory system (kidneys, ureters, bladder); lymphatic system (lymph, lymph nodes, lymph vessels, tonsils, adenoids, thymus, spleen); integumentary system (skin, hair, nails); muscular system (e.g., skeletal muscle); nervous system (brain, spinal cord, nerves); reproductive system (ovaries, uterus, mammary glands, testes, vas deferens, seminal vesicles, prostate); respiratory system (pharynx, larynx, trachea, bronchi, lungs, diaphragm); skeletal system (bone, cartilage), and combinations thereof. In embodiments, the cells are from a highly mitotic tissue (e.g., a highly mitotic healthy tissue, such as epithelium, embryonic tissue, bone marrow, intestinal crypts). In embodiments, the tissue sample is a highly metabolic tissue (e.g., skeletal tissue, neural tissue, cardiomyocytes).

[0368] In some embodiments, the cells are from a young donor, e.g., a donor 25 years, 20 years, 18 years, 16 years, 12 years, 10 years, 8 years of age, 5 years of age, 1 year of age, or less. In some embodiments, the cells are from fetal tissue.

[0369] In some embodiments, the cells are derived from a subject and administered to the same subject or a subject with a similar genetic signature (e.g., MHC-matched).

[0370] In certain embodiments, the cells have telomeres of average size greater than 3000, 4000, 5000, 6000, 7000, 8000, 9000, or 10000 nucleotides in length (e.g., between 4,000-10,000 nucleotides in length, between 6,000-10,000 nucleotides in length).

[0371] In some embodiments, fusosomes are generated from a cell clone identified, chosen, or selected based on a desirable phenotype or genotype for use as a source for fusosome composition described herein. For example, a cell clone is identified, chosen, or selected based on low mitochondrial mutation load, long telomere length, differentiation state, or a particular genetic signature (e.g., a genetic signature to match a recipient).

[0372] A fusosome composition described herein may be comprised of fusosomes from one cellular or tissue source, or from a combination of sources. For example, a fusosome composition may comprise fusosomes from xenogeneic sources (e.g., animals, tissue culture of the aforementioned species' cells), allogeneic, autologous, from specific tissues resulting in different protein concentrations and distributions (liver, skeletal, neural, adipose, etc.), from cells of different metabolic states (e.g., glycolytic, respiring). A composition may also comprise fusosomes in different metabolic states, e.g. coupled or uncoupled, as described elsewhere herein.

[0373] In some embodiments, fusosomes are generated from source cells expressing a fusogen, e.g., a fusogen described herein. In some embodiments, the fusogen is disposed in a membrane of the source cell, e.g., a lipid bilayer membrane, e.g., a cell surface membrane, or a subcellular membrane (e.g., lysosomal membrane). In some embodiments, fusosomes are generated from source cells with a fusogen disposed in a cell surface membrane.

[0374] In some embodiments, fusosomes are generated by inducing budding of an exosome, microvesicle, membrane vesicle, extracellular membrane vesicle, plasma membrane vesicle, giant plasma membrane vesicle, apoptotic body, mitoparticle, pyrenocyte, lysosome, or other membrane enclosed vesicle.

[0375] In some embodiments, fusosomes are generated by inducing cell enucleation. Enucleation may be performed using assays such as genetic, chemical (e.g., using Actinomycin D, see Bayona-Bafaluyet al., “A chemical enucleation method for the transfer of mitochondrial DNA to ρ° cells” Nucleic Acids Res. 2003 Aug. 15; 31(16): e98), mechanical methods (e.g., squeezing or aspiration, see Lee et al., “A comparative study on the efficiency of two enucleation methods in pig somatic cell nuclear transfer: effects of the squeezing and the aspiration methods.” Anim Biotechnol. 2008; 19(2):71-9), or combinations thereof. Enucleation refers not only to a complete removal of the nucleus but also the displacement of the nucleus from its typical location such that the cell contains the nucleus but it is non-functional.

[0376] In embodiments, making a fusosome comprises producing cell ghosts, giant plasma membrane vesicle, or apoptotic bodies. In embodiments, a fusosome composition comprises one or more of cell ghosts, giant plasma membrane vesicle, and apoptotic bodies.

[0377] In some embodiments, fusosomes are generated by inducing cell fragmentation. In some embodiments, cell fragmentation can be performed using the following methods, including, but not limited to: chemical methods, mechanical methods (e.g., centrifugation (e.g., ultracentrifugation, or density centrifugation), freeze-thaw, or sonication), or combinations thereof.

[0378] In some embodiments, a fusosome can be generated from a source cell expressing a fusogen, e.g., as described herein, by any one, all of, or a combination of the following methods:
[0379] i) inducing budding of a mitoparticle, exosome, or other membrane enclosed vesicle;
[0380] ii) inducing nuclear inactivation, e.g., enucleation, by any of the following methods or a combination thereof:

[0381] a) a genetic method;

[0382] b) a chemical method, e.g., using Actinomycin D; or

[0383] c) a mechanical method, e.g., squeezing or aspiration; or
[0384] iii) inducing cell fragmentation, e.g., by any of the following methods or a combination thereof:

[0385] a) a chemical method;

[0386] b) a mechanical method, e.g., centrifugation (e.g., ultracentrifugation or density centrifugation); freeze thaw; or sonication.

[0387] i) Modifications to Cells Prior to Fusosome Generation

[0388] In some aspects, a modification is made to a cell, such as modification of a subject, tissue or cell, prior to fusosome generation. Such modifications can be effective to, e.g., improve fusion, fusogen expression or activity, structure or function of the cargo, or structure or function of the target cell.

[0389] a) Physical Modifications

[0390] In some embodiments, a cell is physically modified prior to generating the fusosome. For example, as described elsewhere herein, a fusogen may be linked to the surface of the cell.

[0391] In some embodiments, a cell is treated with a chemical agent prior to generating the fusosome. For example, the cell may be treated with a chemical or lipid fusogen, such that the chemical or lipid fusogen non-covalently or covalently interacts with the surface of the cell or embeds within the surface of the cell. In some embodiments, the cell is treated with an agent to enhance fusogenic properties of the lipids in the cell membrane.

[0392] In some embodiments, the cell is physically modified prior to generating the fusosome with one or more covalent or non-covalent attachment sites for synthetic or endogenous small molecules or lipids on the cell surface that enhance targeting of the fusosome to an organ, tissues, or cell-type.

[0393] In embodiments, a fusosome comprises increased or decreased levels of an endogenous molecule. For instance, the fusosome may comprise an endogenous molecule that also naturally occurs in the naturally occurring source cell but at a higher or lower level than in the fusosome. In some embodiments, the polypeptide is expressed from an exogenous nucleic acid in the source cell or fusosome. In some embodiments, the polypeptide is isolated from a source and loaded into or conjugated to a source cell or fusosome.

[0394] In some embodiments, a cell is treated with a chemical agent, e.g., small molecule, prior to generating the fusosome to increase the expression or activity of an endogenous fusogen in the cell (e.g., in some embodiments, endogenous relative to the source cell, and in some embodiments, endogenous relative to the target cell). In some embodiments, a small molecule may increase expression or activity of a transcriptional activator of the endogenous fusogen. In some embodiments, a small molecule may decrease expression or activity of a transcriptional repressor of the endogenous fusogen. In some embodiments, a small molecule is an epigenetic modifier that increases expression of the endogenous fusogen.

[0395] In some embodiments, fusosomes are generated from cells treated with fusion arresting compounds, e.g., lysophosphatidylcholine. In some embodiments, fusosomes are generated from cells treated with dissociation reagents that do not cleave fusogens, e.g., Accutase.

[0396] In some embodiments, a source cell is physically modified with, e.g., CRISPR activators, prior to generating a fusosome to add or increase the concentration of fusogens.

[0397] In some embodiments, the cell is physically modified to increase or decrease the quantity, or enhance the structure or function of organelles, e.g., mitochondria, Golgi apparatus, endoplasmic reticulum, intracellular vesicles (such as lysosomes, autophagosomes).

[0398] b) Genetic Modifications

[0399] In some embodiments, a cell is genetically modified prior to generating the fusosome to increase the expression of an endogenous fusogen in the cell (e.g., in some embodiments, endogenous relative to the source cell, and in some embodiments, endogenous relative to the target cell). In some embodiments, a genetic modification may increase expression or activity of a transcriptional activator of the endogenous fusogen. In some embodiments, a genetic modification may decrease expression or activity of a transcriptional repressor of the endogenous fusogen. In some embodiments the activator or repressor is a nuclease-inactive cas9 (dCas9) linked to a transcriptional activator or repressor that is targeted to the endogenous fusogen by a guide RNA. In some embodiments, a genetic modification epigenetically modifies an endogenous fusogen gene to increase its expression. In some embodiments the epigenetic activator a nuclease-inactive cas9 (dCas9) linked to an epigenetic modifier that is targeted to the endogenous fusogen by a guide RNA.

[0400] In some embodiments, a cell is genetically modified prior to generating the fusosome to increase the expression of an exogenous fusogen in the cell, e.g., delivery of a transgene. In some embodiments, a nucleic acid, e.g., DNA, mRNA or siRNA, is transferred to the cell prior to generating the fusosome, e.g., to increase or decrease the expression of a cell surface molecule (protein, glycan, lipid or low molecular weight molecule) used for organ, tissue, or cell targeting. In some embodiments, the nucleic acid targets a repressor of a fusogen, e.g., an shRNA, siRNA construct. In some embodiments, the nucleic acid encodes an inhibitor of a fusogen repressor.

[0401] In some embodiments, the method comprises introducing a nucleic acid, that is exogenous relative to the source cell encoding a fusogen into a source cell. The exogenous nucleic acid may be, e.g., DNA or RNA. In some embodiments the exogenous nucleic acid may be e.g., a DNA, a gDNA, a cDNA, an RNA, a pre-mRNA, an mRNA, an miRNA, an siRNA, etc. In some embodiments, the exogenous DNA may be linear DNA, circular DNA, or an artificial chromosome. In some embodiments the DNA is maintained episomally. In some embodiments the DNA is integrated into the genome. The exogenous RNA may be chemically modified RNA, e.g., may comprise one or more backbone modification, sugar modifications, noncanonical bases, or caps. Backbone modifications include, e.g., phosphorothioate, N3′ phosphoramidite, boranophosphate, phosphonoacetate, thio-PACE, morpholino phosphoramidites, or PNA. Sugar modifications include, e.g., 2′-O-Me, 2′F, 2′F-ANA, LNA, UNA, and 2′-O-MOE. Noncanonical bases include, e.g., 5-bromo-U, and 5-iodo-U, 2,6-diaminopurine, C-5 propynyl pyrimidine, difluorotoluene, difluorobenzene, dichlorobenzene, 2-thiouridine, pseudouridine, and dihydrouridine. Caps include, e.g., ARCA. Additional modifications are discussed, e.g., in Deleavey et al., “Designing Chemically Modified Oligonucleotides for Targeted Gene Silencing” Chemistry & Biology Volume 19, Issue 8, 24 Aug. 2012, Pages 937-954, which is herein incorporated by reference in its entirety.

[0402] In some embodiments, a cell is treated with a chemical agent, e.g. a small molecule, prior to generating the fusosome to increase the expression or activity of a fusogen that is exogenous relative to the source cell in the cell. In some embodiments, a small molecule may increase expression or activity of a transcriptional activator of the exogenous fusogen. In some embodiments, a small molecule may decrease expression or activity of a transcriptional repressor of the exogenous fusogen. In some embodiments, a small molecule is an epigenetic modifier that increases expression of the exogenous fusogen.

[0403] In some embodiments, the nucleic acid encodes a modified fusogen. For example, a fusogen that has regulatable fusogenic activity, e.g., specific cell-type, tissue-type or local microenvironment activity. Such regulatable fusogenic activity may include, activation and/or initiation of fusogenic activity by low pH, high pH, heat, infrared light, extracellular enzyme activity (eukaryotic or prokaryotic), or exposure of a small molecule, a protein, or a lipid. In some embodiments, the small molecule, protein, or lipid is displayed on a target cell.

[0404] In some embodiments, a cell is genetically modified prior to generating the fusosome to alter (i.e., upregulate or downregulate) the expression of signaling pathways (e.g., the Wnt/Beta-catenin pathway). In some embodiments, a cell is genetically modified prior to generating the fusosome to alter (e.g., upregulate or downregulate) the expression of a gene or genes of interest. In some embodiments, a cell is genetically modified prior to generating the fusosome to alter (e.g., upregulate or downregulate) the expression of a nucleic acid (e.g. a miRNA or mRNA) or nucleic acids of interest. In some embodiments, nucleic acids, e.g., DNA, mRNA or siRNA, are transferred to the cell prior to generating the fusosome, e.g., to increase or decrease the expression of signaling pathways, genes, or nucleic acids. In some embodiments, the nucleic acid targets a repressor of a signaling pathway, gene, or nucleic acid, or represses a signaling pathway, gene, or nucleic acid. In some embodiments, the nucleic acid encodes a transcription factor that upregulates or downregulates a signaling pathway, gene, or nucleic acid. In some embodiments the activator or repressor is a nuclease-inactive cas9 (dCas9) linked to a transcriptional activator or repressor that is targeted to the signaling pathway, gene, or nucleic acid by a guide RNA. In some embodiments, a genetic modification epigenetically modifies an endogenous signaling pathway, gene, or nucleic acid to its expression. In some embodiments the epigenetic activator a nuclease-inactive cas9 (dCas9) linked to a epigenetic modifier that is targeted to the signaling pathway, gene, or nucleic acid by a guide RNA. In some embodiments, a cell's DNA is edited prior to generating the fusosome to alter (e.g., upregulate or downregulate) the expression of signaling pathways (e.g. the Wnt/Beta-catenin pathway), gene, or nucleic acid. In some embodiments, the DNA is edited using a guide RNA and CRISPR-Cas9/Cpf1 or other gene editing technology.

[0405] A cell may be genetically modified using recombinant methods. A nucleic acid sequence coding for a desired gene can be obtained using recombinant methods, such as, for example by screening libraries from cells expressing the gene, by deriving the gene from a vector known to include the same, or by isolating directly from cells and tissues containing the same, using standard techniques. Alternatively, a gene of interest can be produced synthetically, rather than cloned.

[0406] Expression of natural or synthetic nucleic acids is typically achieved by operably linking a nucleic acid encoding the gene of interest to a promoter, and incorporating the construct into an expression vector. The vectors can be suitable for replication and integration in eukaryotes. Typical cloning vectors contain transcription and translation terminators, initiation sequences, and promoters useful for expression of the desired nucleic acid sequence.

[0407] In some embodiments, a cell may be genetically modified with one or more expression regions, e.g., a gene. In some embodiments, the cell may be genetically modified with an exogenous gene (e.g., capable of expressing an exogenous gene product such as an RNA or a polypeptide product) and/or an exogenous regulatory nucleic acid. In some embodiments, the cell may be genetically modified with an exogenous sequence encoding a gene product that is endogenous to a target cell and/or an exogenous regulatory nucleic acid capable of modulating expression of an endogenous gene. In some embodiments, the cell may be genetically modified with an exogenous gene and/or a regulatory nucleic acid that modulates expression of an exogenous gene. In some embodiments, the cell may be genetically modified with an exogenous gene and/or a regulatory nucleic acid that modulates expression of an endogenous gene. It will be understood by one of skill in the art that the cell described herein may be genetically modified to express a variety of exogenous genes that encode proteins or regulatory molecules, which may, e.g., act on a gene product of the endogenous or exogenous genome of a target cell. In some embodiments, such genes confer characteristics to the fusosome, e.g., modulate fusion with a target cell. In some embodiments, the cell may be genetically modified to express an endogenous gene and/or regulatory nucleic acid. In some embodiments, the endogenous gene or regulatory nucleic acid modulates the expression of other endogenous genes. In some embodiments, the cell may be genetically modified to express an endogenous gene and/or regulatory nucleic acid which is expressed differently (e.g., inducibly, tissue-specifically, constitutively, or at a higher or lower level) than a version of the endogenous gene and/or regulatory nucleic acid on other chromosomes.

[0408] The promoter elements, e.g., enhancers, regulate the frequency of transcriptional initiation. Typically, these are located in the region 30-110 bp upstream of the start site, although a number of promoters have recently been shown to contain functional elements downstream of the start site as well. The spacing between promoter elements frequently is flexible, so that promoter function is preserved when elements are inverted or moved relative to one another. In the thymidine kinase (tk) promoter, the spacing between promoter elements can be increased to 50 bp apart before activity begins to decline. Depending on the promoter, it appears that individual elements can function either cooperatively or independently to activate transcription.

[0409] One example of a suitable promoter is the immediate early cytomegalovirus (CMV) promoter sequence. This promoter sequence is a strong constitutive promoter sequence capable of driving high levels of expression of any polynucleotide sequence operatively linked thereto. Another example of a suitable promoter is Elongation Growth Factor-1α (EF-1α). However, other constitutive promoter sequences may also be used, including, but not limited to the simian virus 40 (SV40) early promoter, mouse mammary tumor virus (MMTV), human immunodeficiency virus (HIV) long terminal repeat (LTR) promoter, MoMuLV promoter, an avian leukemia virus promoter, an Epstein-Barr virus immediate early promoter, a Rous sarcoma virus promoter, as well as human gene promoters such as, but not limited to, the actin promoter, the myosin promoter, the hemoglobin promoter, and the creatine kinase promoter.

[0410] Further, the invention should not be limited to the use of constitutive promoters. Inducible promoters are also contemplated as part of the invention. The use of an inducible promoter provides a molecular switch capable of turning on expression of the polynucleotide sequence which it is operatively linked when such expression is desired, or turning off the expression when expression is not desired. Examples of inducible promoters include, but are not limited to a tissue-specific promoter, metallothionine promoter, a glucocorticoid promoter, a progesterone promoter, and a tetracycline promoter. In some embodiments, expression of a fusogen is upregulated before fusosomes are generated, e.g., 3, 6, 9, 12, 24, 26, 48, 60, or 72 hours before fusosomes are generated.

[0411] The expression vector to be introduced into the source can also contain either a selectable marker gene or a reporter gene or both to facilitate identification and selection of expressing cells from the population of cells sought to be transfected or infected through viral vectors. In other aspects, the selectable marker may be carried on a separate piece of DNA and used in a co-transfection procedure. Both selectable markers and reporter genes may be flanked with appropriate regulatory sequences to enable expression in the host cells. Useful selectable markers include, for example, antibiotic-resistance genes, such as neo and the like.

[0412] Reporter genes may be used for identifying potentially transfected cells and for evaluating the functionality of regulatory sequences. In general, a reporter gene is a gene that is not present in or expressed by the recipient source and that encodes a polypeptide whose expression is manifested by some easily detectable property, e.g., enzymatic activity. Expression of the reporter gene is assayed at a suitable time after the DNA has been introduced into the recipient cells. Suitable reporter genes may include genes encoding luciferase, beta-galactosidase, chloramphenicol acetyl transferase, secreted alkaline phosphatase, or the green fluorescent protein gene (e.g., Ui-Tei et al., 2000 FEBS Letters 479: 79-82). Suitable expression systems are well known and may be prepared using known techniques or obtained commercially. In general, the construct with the minimal 5′ flanking region showing the highest level of expression of reporter gene is identified as the promoter. Such promoter regions may be linked to a reporter gene and used to evaluate agents for the ability to modulate promoter-driven transcription.

[0413] In some embodiments, a cell may be genetically modified to alter expression of one or more proteins. Expression of the one or more proteins may be modified for a specific time, e.g., development or differentiation state of the source. In some embodiments, fusosomes are generated from a source of cells genetically modified to alter expression of one or more proteins, e.g., fusogen proteins or non-fusogen proteins that affect fusion activity, structure or function. Expression of the one or more proteins may be restricted to a specific location(s) or widespread throughout the source.

[0414] In some embodiments, the expression of a fusogen protein is modified. In some embodiments, fusosomes are generated from cells with modified expression of a fusogen protein, e.g., an increase or a decrease in expression of a fusogen by at least 10%, 15%, 20%, 30%, 40%, 50%, 60%, 75%, 80%, 90% or more.

[0415] In some embodiments, cells may be engineered to express a cytosolic enzyme (e.g., proteases, phosphatases, kinases, demethylases, methyltransferases, acetylases) that targets a fusogen protein. In some embodiments, the cytosolic enzyme affects one or more fusogens by altering post-translational modifications. Post-translational protein modifications of proteins may affect responsiveness to nutrient availability and redox conditions, and protein-protein interactions. In some embodiments, a fusosome comprises fusogens with altered post-translational modifications, e.g., an increase or a decrease in post-translational modifications by at least 10%, 15%, 20%, 30%, 40%, 50%, 60%, 75%, 80%, 90% or more.

[0416] Methods of introducing a modification into a cell include physical, biological and chemical methods. See, for example, Geng. & Lu, Microfluidic electroporation for cellular analysis and delivery. Lab on a Chip. 13(19):3803-21. 2013; Sharei, A. et al. A vector-free microfluidic platform for intracellular delivery. PNAS vol. 110 no. 6. 2013; Yin, H. et al., Non-viral vectors for gene-based therapy. Nature Reviews Genetics. 15: 541-555. 2014. Suitable methods for modifying a cell for use in generating the fusosomes described herein include, for example, diffusion, osmosis, osmotic pulsing, osmotic shock, hypotonic lysis, hypotonic dialysis, ionophoresis, electroporation, sonication, microinjection, calcium precipitation, membrane intercalation, lipid mediated transfection, detergent treatment, viral infection, receptor mediated endocytosis, use of protein transduction domains, particle firing, membrane fusion, freeze-thawing, mechanical disruption, and filtration.

[0417] Confirming the presence of a genetic modification includes a variety of assays. Such assays include, for example, molecular biological assays, such as Southern and Northern blotting, RT-PCR and PCR; biochemical assays, such as detecting the presence or absence of a particular peptide, e.g., by immunological means (ELISAs and Western blots) or by assays described herein.

[0418] The present disclosure provides, in some aspects, a fusosome comprising: (a) a lipid bilayer, (b) a lumen (e.g., comprising cytosol) surrounded by the lipid bilayer; (c) an exogenous or overexpressed fusogen, e.g., wherein the fusogen is disposed in the lipid bilayer, wherein the fusosome is derived from a source cell; and wherein the fusosome has partial or complete nuclear inactivation (e.g., nuclear removal).

[0419] The present disclosure provides, in some aspects, a fusosome composition comprising a plurality of fusosomes derived from a source cell, wherein the fusosomes of the plurality comprise: (a) a lipid bilayer, (b) a lumen comprising cytosol, wherein the lumen is surrounded by the lipid bilayer; (c) an exogenous or overexpressed fusogen disposed in the lipid bilayer, (d) a nucleic acid, e.g., a nucleic acid comprising a payload gene; and wherein the fusosome does not comprise a nucleus; wherein the amount of viral capsid protein in the fusosome composition is less than 1% of total protein; wherein: (i) when the plurality of fusosomes are contacted with a cell population comprising target cells and non-target cells, the cargo is present in at least 10-fold more target cells than non-target cells or reference cells, or (ii) the fusosomes of the plurality fuse at a higher rate with a target cell than with a non-target cell or reference cell by at least at least 50%; wherein the target cell is chosen from a pan-neuronal cell, a GABAergic neuron, a Glutamatergic neuron, a Cholinergic neuron, a Dopaminergic neuron, a Serotonergic neuron, a glial cell, an astrocyte, a microglial cell, an oligodendrocyte, or a choroid plexus cell.

[0420] The present disclosure provides, in some aspects, a fusosome composition comprising a plurality of fusosomes derived from a source cell, wherein the fusosomes of the plurality comprise: (a) a lipid bilayer, (b) a lumen comprising cytosol, wherein the lumen is surrounded by the lipid bilayer; (c) an exogenous or overexpressed fusogen disposed in the lipid bilayer, (d) a nucleic acid comprising a payload gene encoding an exogenous agent of Table 5 or Table 6, wherein the fusosome does not comprise a nucleus; and wherein the amount of viral capsid protein in the fusosome composition is less than 1% of total protein.

[0421] The present disclosure provides, in some aspects, a fusosome composition comprising a plurality of fusosomes derived from a source cell, wherein the fusosomes of the plurality comprise: (a) a lipid bilayer, (b) a lumen comprising cytosol, wherein the lumen is surrounded by the lipid bilayer; (c) an exogenous or overexpressed fusogen disposed in the lipid bilayer, (d) a nucleic acid comprising a payload gene, wherein the nucleic acid comprises a NTCSRE operably linked to the payload gene, wherein the NTCSRE comprises a non-target cell-specific miRNA recognition sequence, e.g., a non-target cell-specific miRNA recognition sequence bound by a miRNA present in a non-target cell at a higher level than in a target cell, e.g., a non-target cell-specific miRNA recognition sequence bound by a miRNA of Table 4, wherein the target cell is a first type of CNS cell, optionally wherein the non-target cell is a second, different type of CNS cell or a non-CNS cell; and wherein the fusosome does not comprise a nucleus; and wherein the amount of viral capsid protein in the fusosome composition is less than 1% of total protein.

[0422] In some embodiments, the miRNA is present in a non-target cell (e.g., a non-target cell described herein) at a level at least 10, 100, 1,000, or 10,000 times higher than the level of the miRNA present in the target cell (e.g., a CNS cell). In some embodiments, the miRNA is not detectably present in a target cell (e.g., a CNS cell, e.g., a CNS cell described herein). In some embodiments, the miRNA is not present in the target cell (e.g., a CNS cell, e.g., a CNS cell described herein).

[0423] The present disclosure provides, in some aspects, a fusosome composition comprising a plurality of fusosomes derived from a source cell, wherein the fusosomes of the plurality comprise: (a) a lipid bilayer, (b) a lumen comprising cytosol, wherein the lumen is surrounded by the lipid bilayer; (c) an exogenous or overexpressed fusogen disposed in the lipid bilayer, (d) a nucleic acid comprising a payload gene, wherein the nucleic acid comprises a promoter operably linked to the payload gene, wherein the promoter is a CNS cell-specific promoter, e.g., is a promoter specific for a CNS cell, a pan-neuronal cell, a GABAergic neuron, a Glutamatergic neuron, a Cholinergic neuron, a Dopaminergic neuron, a Serotonergic neuron, a glial cell, an astrocyte, a microglial cell, an oligodendrocyte, or a choroid plexus cell; wherein the fusosome does not comprise a nucleus; and wherein the amount of viral capsid protein in the fusosome composition is less than 1% of total protein.

[0424] The present disclosure provides, in some aspects, a fusosome composition comprising a plurality of fusosomes derived from a source cell, wherein the fusosomes of the plurality comprise: (a) a lipid bilayer, (b) a lumen comprising cytosol, wherein the lumen is surrounded by the lipid bilayer; (c) an exogenous or overexpressed fusogen disposed in the lipid bilayer, (d) a nucleic acid comprising a payload gene, wherein the nucleic acid comprises a promoter having sequence of a promoter in Table 3, or a sequence having at least 70%, 75%, 80%, 85%, 90%, 95%, 96%, 97%, 98%, or 99% identity thereto; wherein the fusosome does not comprise a nucleus; and wherein the amount of viral capsid protein in the fusosome composition is less than 1% of total protein;

[0425] The present disclosure provides, in some aspects, a fusosome composition comprising a plurality of fusosomes derived from a source cell, wherein the fusosomes of the plurality comprise: (a) a lipid bilayer, (b) a lumen comprising cytosol, wherein the lumen is surrounded by the lipid bilayer; (c) an exogenous or overexpressed fusogen disposed in the lipid bilayer, (d) a nucleic acid comprising: (i) a payload gene; (ii) a NTCSRE operably linked to the payload gene, e.g., wherein the NTCSRE comprises a non-target cell-specific miRNA recognition sequence, e.g., a non-target cell-specific miRNA recognition sequence bound by a miRNA of Table 4, and

[0426] (iii) optionally, a positive target cell-specific regulatory element, e.g., a positive target cell-specific regulatory element (e.g., a target cell-specific promoter) operatively linked to the payload gene, wherein the positive target cell-specific regulatory element increases expression of the payload gene in a target cell relative to an otherwise similar fusosome lacking the positive target cell-specific regulatory element, wherein the target cell is a first type of CNS cell; optionally wherein the non-target cell is a second, different type of CNS cell or a non-CNS cell, optionally wherein: the target cell is a neuron and the non-target cell is a glial cell (e.g., an oligodendrocyte, an astrocyte, or a microglial cell), or the target cell is a glial cell (e.g., an oligodendrocyte, an astrocyte, or a microglial cell) and the non-target cell is a neuron; wherein the fusosome does not comprise a nucleus; and wherein the amount of viral capsid protein in the fusosome composition is less than 1% of total protein.

[0427] In some embodiments, one or more of the following is present: i) the fusosome comprises or is comprised by a cytobiologic; ii) the fusosome comprises an enucleated cell; iii) the fusosome comprises an inactivated nucleus; iv) the fusosome fuses at a higher rate with a target cell than with a non-target cell, e.g., by at least at least 1%, 2%, 3%, 4%, 5%, 10%, 20%, 30%, 40%, 50%, 60%, 70%, 80%, 90%, 2-fold, 3-fold, 4-fold, 5-fold, 10-fold, 20-fold, 50-fold, or 100-fold, e.g., in an assay of Example 42; v) the fusosome fuses at a higher rate with a target cell than with other fusosomes, e.g., by at least 10%, 20%, 30%, 40%, 50%, 60%, 70%, 80%, or 90%, 2-fold, 3-fold, 4-fold, 5-fold, 10-fold, 20-fold, 50-fold, or 100-fold, e.g., in an assay of Example 42; vi) the fusosome fuses with target cells at a rate such that an agent in the fusosome is delivered to at least 10%, 20%, 30%, 40%, 50%, 60%, 70%, 80%, or 90%, of target cells after 24, 48, or 72 hours, e.g., in an assay of Example 42; vii) the fusogen is present at a copy number of at least, or no more than, 10, 50, 100, 500, 1,000, 2,000, 5,000, 10,000, 20,000, 50,000, 100,000, 200,000, 500,000, 1,000,000, 5,000,000, 10,000,000, 50,000,000, 100,000,000, 500,000,000, or 1,000,000,000 copies, e.g., as measured by an assay of Example 26; viii) the fusosome comprises a therapeutic agent at a copy number of at least, or no more than, 10, 50, 100, 500, 1,000, 2,000, 5,000, 10,000, 20,000, 50,000, 100,000, 200,000, 500,000, 1,000,000, 5,000,000, 10,000,000, 50,000,000, 100,000,000, 500,000,000, or 1,000,000,000 copies, e.g., as measured by an assay of Example 88; ix) the ratio of the copy number of the fusogen to the copy number of the therapeutic agent is between 1,000,000:1 and 100,000:1, 100,000:1 and 10,000:1, 10,000:1 and 1,000:1, 1,000:1 and 100:1, 100:1 and 50:1, 50:1 and 20:1, 20:1 and 10:1, 10:1 and 5:1, 5:1 and 2:1, 2:1 and 1:1, 1:1 and 1:2, 1:2 and 1:5, 1:5 and 1:10, 1:10 and 1:20, 1:20 and 1:50, 1:50 and 1:100, 1:100 and 1:1,000, 1:1,000 and 1:10,000, 1:10,000 and 1:100,000, or 1:100,000 and 1:1,000,000; x) the fusosome comprises a lipid composition substantially similar to that of the source cell or wherein one or more of CL, Cer, DAG, HexCer, LPA, LPC, LPE, LPG, LPI, LPS, PA, PC, PE, PG, PI, PS, CE, SM and TAG is within 10%, 15%, 20%, 25%, 30%, 35%, 40%, 45%, 50%, 55%, 60%, 65%, 70%, or 75% of the corresponding lipid level in the source cell; xi) the fusosome comprises a proteomic composition similar to that of the source cell, e.g., using an assay of Example 87; xii) the fusosome comprises a ratio of lipids to proteins that is within 10%, 20%, 30%, 40%, or 50% of the corresponding ratio in the source cell, e.g., as measured using an assay of Example 40; xiii) the fusosome comprises a ratio of proteins to nucleic acids (e.g., DNA) that is within 10%, 20%, 30%, 40%, or 50% of the corresponding ratio in the source cell, e.g., as measured using an assay of Example 41; xiv) the fusosome comprises a ratio of lipids to nucleic acids (e.g., DNA) that is within 10%, 20%, 30%, 40%, or 50% of the corresponding ratio in the source cell, e.g., as measured using an assay of Example 91; xv) the fusosome has a half-life in a subject, e.g., in a mouse, that is within 1%, 2%, 3%, 4%, 5%, 10%, 20%, 30%, 40%, 50%, 60%, 70%, 80%, 90%, 100% of the half life of a reference cell, e.g., the source cell, e.g., by an assay of Example 60; xvi) the fusosome transports glucose (e.g., labeled glucose, e.g., 2-NBDG) across a membrane, e.g., by at least 1%, 2%, 3%, 4%, 5%, 10%, 20%, 30%, 40%, 50%, 60%, 70%, 80%, 90%, 100% more (e.g., about 11.6% more) than a negative control, e.g., an otherwise similar fusosome in the absence of glucose, e.g., as measured using an assay of Example 50; xvii) the fusosome comprises esterase activity in the lumen that is within 1%, 2%, 3%, 4%, 5%, 10%, 20%, 30%, 40%, 50%, 60%, 70%, 80%, 90%, or 100% of that of the esterase activity in a reference cell, e.g., the source cell or a mouse embryonic fibroblast, e.g., using an assay of Example 51; xviii) the fusosome comprises a metabolic activity level that is within 1%, 2%, 3%, 4%, 5%, 10%, 20%, 30%, 40%, 50%, 60%, 70%, 80%, 90%, or 100% of the citrate synthase activity in a reference cell, e.g., the source cell, e.g., as described in Example 53; xix) the fusosome comprises a respiration level (e.g., oxygen consumption rate) that is within 1%, 2%, 3%, 4%, 5%, 10%, 20%, 30%, 40%, 50%, 60%, 70%, 80%, 90%, or 100% of the respiration level in a reference cell, e.g., the source cell, e.g., as described in Example 54; xx) the fusosome comprises an Annexin-V staining level of at most 18,000, 17,000, 16,000, 15,000, 14,000, 13,000, 12,000, 11,000, or 10,000 MFI, e.g., using an assay of Example 55, or wherein the fusosome comprises an Annexin-V staining level at least 5%, 10%, 20%, 30%, 40%, or 50% lower than the Annexin-V staining level of an otherwise similar fusosome treated with menadione in the assay of Example 55, or wherein the fusosome comprises an Annexin-V staining level at least 5%, 10%, 20%, 30%, 40%, or 50% lower than the Annexin-V staining level of a macrophage treated with menadione in the assay of Example 55, xxi) the fusosome has a miRNA content level of at least at least 1%, 2%, 3%, 4%, 5%, 10%, 20%, 30%, 40%, 50%, 60%, 70%, 80%, 90%, or greater than that of the source cell, e.g., by an assay of Example 33; xxii) the fusosome has a soluble: non-soluble protein ratio is within 1%, 2%, 3%, 4%, 5%, 10%, 20%, 30%, 40%, 50%, 60%, 70%, 80%, 90%, or greater than that of the source cell, e.g., within 1%-2%, 2%-3%, 3%-4%, 4%-5%, 5%-10%, 10%-20%, 20%-30%, 30%-40%, 40%-50%, 50%-60%, 60%-70%, 70%-80%, or 80%-90% of that of the source cell, e.g., by an assay of Example 38; xxiii) the fusosome has an LPS level less than 5%, 1%, 0.5%, 0.01%, 0.005%, 0.0001%, 0.00001% or less of the LPS content of the source cell, e.g., as measured by mass spectrometry, e.g., in an assay of Example 39; xxiv) the fusosome is capable of signal transduction, e.g., transmitting an extracellular signal, e.g., AKT phosphorylation in response to insulin, or glucose (e.g., labeled glucose, e.g., 2-NBDG) uptake in response to insulin, e.g., by at least 1%, 2%, 3%, 4%, 5%, 10%, 20%, 30%, 40%, 50%, 60%, 70%, 80%, 90%, 100% more than a negative control, e.g., an otherwise similar fusosome in the absence of insulin, e.g., using an assay of Example 49; xxv) the fusosome targets a tissue, e.g., liver, lungs, heart, spleen, pancreas, gastrointestinal tract, kidney, testes, ovaries, brain, reproductive organs, central nervous system, peripheral nervous system, skeletal muscle, endothelium, inner ear, or eye, when administered to a subject, e.g., a mouse, e.g., wherein at least 0.1%, 0.5%, 1%, 1.5%, 2%, 2.5%, 3%, 4%, 5%, 10%, 20%, 30%, 40%, 50%, 60%, 70%, 80%, or 90% of the fusosomes in a population of administered fusosomes are present in the target tissue after 24, 48, or 72 hours, e.g., by an assay of Example 64; xxvi) the fusosome has juxtacrine-signaling level of at least 1%, 2%, 3%, 4%, 5%, 10%, 20%, 30%, 40%, 50%, 60%, 70%, 80%, 90%, or 100% greater than the level of juxtacrine signaling induced by a reference cell, e.g., the source cell or a bone marrow stromal cell (BMSC), e.g., by an assay of Example 56; xxvii) the fusosome has paracrine-signaling level of at least 1%, 2%, 3%, 4%, 5%, 10%, 20%, 30%, 40%, 50%, 60%, 70%, 80%, 90%, 100% greater than the level of paracrine signaling induced by a reference cell, e.g., the source cell or a macrophage, e.g., by an assay of Example 57; xxviii) the fusosome polymerizes actin at a level within 1%, 2%, 3%, 4%, 5%, 10%, 20%, 30%, 40%, 50%, 60%, 70%, 80%, 90%, or 100% compared to the level of polymerized actin in a reference cell, e.g., the source cell or a C2C12 cell, e.g., by the assay of Example 58; xxix) the fusosome has a membrane potential within about 1%, 2%, 3%, 4%, 5%, 10%, 20%, 30%, 40%, 50%, 60%, 70%, 80%, 90%, 100% of the membrane potential of a reference cell, e.g., the source cell or a C2C12 cell, e.g., by an assay of Example 59, or wherein the fusosome has a membrane potential of about −20 to −150 mV, −20 to −50 mV, −50 to −100 mV, or −100 to −150 mV; xxx) the fusosome is capable of extravasation from blood vessels, e.g., at a rate at least 1%, 2%, 5%, 10%, 20%, 30%, 40%, 50%, 60%, 70%, 80%, or 90% the rate of extravasation of the source cell or of a cell of the same type as the source cell, e.g., using an assay of Example 44, e.g., wherein the source cell is a neutrophil, lymphocyte, B cell, macrophage, or NK cell; xxxi) the fusosome is capable of crossing a cell membrane, e.g., an endothelial cell membrane or the blood brain barrier; xxxii) the fusosome is capable of secreting a protein, e.g., at a rate at least 1%, 2%, 3%, 4%, 5%, 10%, 20%, 30%, 40%, 50%, 60%, 70%, 80%, 90%, or 100% greater than a reference cell, e.g., a mouse embryonic fibroblast, e.g., using an assay of Example 48; xxxiii) the fusosome meets a pharmaceutical or good manufacturing practices (GMP) standard; xxxiv) the fusosome was made according to good manufacturing practices (GMP); xxxv) the fusosome has a pathogen level below a predetermined reference value, e.g., is substantially free of pathogens; xxxiv) the fusosome has a contaminant level below a predetermined reference value, e.g., is substantially free of contaminants; xxxvii) the fusosome has low immunogenicity, e.g., as described herein; xxxviii) the source cell is selected from a neutrophil, a granulocyte, a mesenchymal stem cell, a bone marrow stem cell, an induced pluripotent stem cell, an embryonic stem cell, a myeloblast, a myoblast, a hepatocyte, or a neuron e.g., retinal neuronal cell; or xxxix) the source cell is other than a 293 cell, HEK cell, human endothelial cell, or a human epithelial cell, monocyte, macrophage, dendritic cell, or stem cell.

[0428] The present disclosure also provides, in some aspects, a fusosome comprising: a) a lipid bilayer and a lumen that is miscible with an aqueous solution, e.g., water, wherein the fusosome is derived from a source cell, b) an exogenous or overexpressed fusogen disposed in the lipid bilayer, and c) an organelle, e.g., a therapeutically effective number of organelles, disposed in the lumen.

[0429] In some embodiments, one or more of the following is present: i) the source cell is selected from an endothelial cell, a macrophage, a neutrophil, a granulocyte, a leukocyte, a stem cell (e.g., a mesenchymal stem cell, a bone marrow stem cell, an induced pluripotent stem cell, an embryonic stem cell), a myeloblast, a myoblast, a hepatocyte, or a neuron e.g., retinal neuronal cell; ii) the organelle is selected from a Golgi apparatus, lysosome, endoplasmic reticulum, mitochondria, vacuole, endosome, acrosome, autophagosome, centriole, glycosome, glyoxysome, hydrogenosome, melanosome, mitosome, cnidocyst, peroxisome, proteasome, vesicle, and stress granule; iii) the fusosome has a size of greater than 5 um, 10 um, 20 um, 50 um, or 100 um; iv) the fusosome, or a composition or preparation comprising a plurality of the fusosomes, has a density of other than between 1.08 g/ml and 1.12 g/ml, e.g., the fusosome has a density of 1.25 g/ml+/−0.05, e.g., as measured by an assay of Example 30; v) the fusosome is not captured by the scavenger system in circulation or by Kupffer cells in the sinus of the liver; vi) the source cell is other than a 293 cell; vii) the source cell is not transformed or immortalized; viii) the source cell is transformed, or immortalized using a method other than adenovirus-mediated immortalization, e.g., immortalized by spontaneous mutation, or telomerase expression; ix) the fusogen is other than VSVG, a SNARE protein, or a secretory granule protein; x) the fusosome does not comprise Cre or GFP, e.g., EGFP; xi) the fusosome further comprises an exogenous protein other than Cre or GFP, e.g., EGFP xii) the fusosome further comprises an exogenous nucleic acid (e.g., RNA, e.g., mRNA, miRNA, or siRNA) or an exogenous protein (e.g., an antibody, e.g., an antibody), e.g., in the lumen; or xiii) the fusosome does not comprise mitochondria.

[0430] The present disclosure also provides, in some aspects, a fusosome comprising: (a) a lipid bilayer, (b) a lumen (e.g., comprising cytosol) surrounded by the lipid bilayer, (c) an exogenous or overexpressed fusogen, e.g., wherein the fusogen is disposed in the lipid bilayer, and (d) a functional nucleus, wherein the fusosome is derived from a source cell.

[0431] In some embodiments, one or more of the following is present: i) the source cell is other than a dendritic cell or tumor cell, e.g., the source cell is selected from an endothelial cell, a macrophage, a neutrophil, a granulocyte, a leukocyte, a stem cell (e.g., a mesenchymal stem cell, a bone marrow stem cell, an induced pluripotent stem cell, an embryonic stem cell), a myeloblast, a myoblast, a hepatocyte, or a neuron e.g., retinal neuronal cell; ii) the fusogen is other than a fusogenic glycoprotein; iii) the fusogen is a mammalian protein other than fertilin-beta, iv) the fusosome has low immunogenicity, e.g., as described herein; v) the fusosome meets a pharmaceutical or good manufacturing practices (GMP) standard; vi) the fusosome was made according to good manufacturing practices (GMP); vii) the fusosome has a pathogen level below a predetermined reference value, e.g., is substantially free of pathogens; or viii) the fusosome has a contaminant level below a predetermined reference value, e.g., is substantially free of contaminants.

[0432] The present disclosure also provides, in some aspects, a fusosome composition comprising a plurality of fusosomes derived from a source cell, wherein the fusosomes of the plurality comprise:(a) a lipid bilayer,(b) a lumen comprising cytosol, wherein the lumen is surrounded by the lipid bilayer; (c) an exogenous or overexpressed fusogen disposed in the lipid bilayer, (d) a cargo; and wherein the fusosome does not comprise a nucleus; wherein the amount of viral capsid protein in the fusosome composition is less than 1% of total protein; wherein the plurality of fusosomes, when contacted with a target cell population in the presence of an inhibitor of endocytosis, and when contacted with a reference target cell population not treated with the inhibitor of endocytosis, delivers the cargo to at least 30% of the number of cells in the target cell population compared to the reference target cell population.

[0433] The present disclosure also provides, in some aspects, a fusosome composition comprising a plurality of fusosomes derived from a source cell, and wherein the fusosomes of the plurality comprise: (a) a lipid bilayer, (b) a lumen comprising cytosol, wherein the lumen is surrounded by the lipid bilayer; (c) an exogenous or overexpressed re-targeted fusogen disposed in the lipid bilayer; (d) a cargo; and wherein the fusosome does not comprise a nucleus; wherein the amount of viral capsid protein in the fusosome composition is less than 1% of total protein; wherein: (i) when the plurality of fusosomes are contacted with a cell population comprising target cells and non-target cells, the cargo is present in at least 2-fold, 5-fold, 10-fold, 20-fold, 50-fold, or 100-fold more target cells than non-target cells, or (ii) the fusosomes of the plurality fuse at a higher rate with a target cell than with a non-target cell by at least at least 50%.

[0434] The present disclosure also provides, in some aspects, a fusosome composition comprising a plurality of fusosomes derived from a source cell, and wherein the fusosomes of the plurality comprise: (a) a lipid bilayer, (b) a lumen surrounded by the lipid bilayer; (c) an exogenous or overexpressed fusogen, wherein the fusogen is disposed in the lipid bilayer; and (d) a cargo; wherein the fusosome does not comprise a nucleus; and wherein one or more of (e.g., at least 2, 3, 4, or 5 of): i) the fusogen is present at a copy number of at least 1,000 copies; ii) the fusosome comprises a therapeutic agent at a copy number of at least 1,000 copies; iii) the fusosome comprises a lipid wherein one or more of CL, Cer, DAG, HexCer, LPA, LPC, LPE, LPG, LPI, LPS, PA, PC, PE, PG, PI, PS, CE, SM and TAG is within 75% of the corresponding lipid level in the source cell; iv) the fusosome comprises a proteomic composition similar to that of the source cell; v) the fusosome is capable of signal transduction, e.g., transmitting an extracellular signal, e.g., AKT phosphorylation in response to insulin, or glucose (e.g., labeled glucose, e.g., 2-NBDG) uptake in response to insulin, e.g., by at least 10% more than a negative control, e.g., an otherwise similar fusosome in the absence of insulin; vi) the fusosome targets a tissue, e.g., liver, lungs, heart, spleen, pancreas, gastrointestinal tract, kidney, testes, ovaries, brain, reproductive organs, central nervous system, peripheral nervous system, skeletal muscle, endothelium, inner ear, or eye, when administered to a subject, e.g., a mouse, e.g., wherein at least 0.1%, or 10%, of the fusosomes in a population of administered fusosomes are present in the target tissue after 24 hours; or the source cell is selected from a neutrophil, a granulocyte, a mesenchymal stem cell, a bone marrow stem cell, an induced pluripotent stem cell, an embryonic stem cell, a myeloblast, a myoblast, a hepatocyte, or a neuron e.g., retinal neuronal cell.

[0435] In embodiments, one or more of: i) the source cell is other than a 293 cell; ii) the source cell is not transformed or immortalized; iii) the source cell is transformed or immortalized using a method other than adenovirus-mediated immortalization, e.g., immortalized by spontaneous mutation or telomerase expression; iv) the fusogen is other than VSVG, a SNARE protein, or a secretory granule protein; v) the therapeutic agent is other than Cre or EGFP; vi) the therapeutic agent is a nucleic acid (e.g., RNA, e.g., mRNA, miRNA, or siRNA) or an exogenous protein (e.g., an antibody, e.g., an antibody), e.g., in the lumen; or vii) the fusosome does not comprise mitochondria.

[0436] In embodiments, one or more of: i) the source cell is other than a 293 or HEK cell; ii) the source cell is not transformed or immortalized; iii) the source cell is transformed or immortalized using a method other than adenovirus-mediated immortalization, e.g., immortalized by spontaneous mutation or telomerase expression; iv) the fusogen is not a viral fusogen; or v) the fusosome has a size of other than between 40 and 150 nm, e.g., greater than 150 nm, 200 nm, 300 nm, 400 nm, or 500 nm.

[0437] In embodiments, one or more of: i) the therapeutic agent is a soluble protein expressed by the source cell; ii) the fusogen is other than TAT, TAT-HA2, HA-2, gp41, Alzheimer's beta-amyloid peptide, a Sendai virus protein, or amphipathic net-negative peptide (WAE 11); iii) the fusogen is a mammalian fusogen; iv) the fusosome comprises in its lumen a polypeptide selected from an enzyme, antibody, or anti-viral polypeptide; v) the fusosome does not comprise an exogenous therapeutic transmembrane protein; or vi) the fusosome does not comprise CD63 or GLUT4, or the fusosome comprises less than or equal to 0.05%, 0.1%, 0.5%, 1%, 2%, 3%, 4%, 5%, or 10% CD63 (e.g., about 0.048% or less), e.g., as determined according to the method described in Example 89.

[0438] In embodiments, the fusosome: i) does not comprise a virus, is not infectious, or does not propagate in a host cell; ii) is not a viral vector iii) is not a VLP (virus like particle); iv) does not comprise a viral structural protein, e.g., a protein derived from gag, e.g. a viral capsid protein, e.g. a viral capsule protein, e.g., a viral nucleocapsid protein, or wherein the amount of viral capsid protein is less than 10%, 5%, 4%, 3%, 2%, 1%, 0.5%, 0.2%, or 0.1% of total protein, e.g., by mass spectrometry, e.g. using an assay of Example 93; v) does not comprise a viral matrix protein; vi) does not comprise a viral non-structural protein; e.g. pol or a fragment or variant thereof, a viral reverse transcriptase protein, a viral integrase protein, or a viral protease protein. vii) does not comprise viral nucleic acid; e.g. viral RNA or viral DNA; viii) comprises less than 10, 50, 100, 500, 1,000, 2,000, 5,000, 10,000, 20,000, 50,000, 100,000, 200,000, 500,000, 1,000,000, 5,000,000, 10,000,000, 50,000,000, 100,000,000, 500,000,000, or 1,000,000,000 copies per vesicle of a viral structural protein; or ix) the fusosome is not a virosome.

[0439] In some embodiments, the fusosome comprises (or is identified as comprising) less than about 0.01%, 0.05%, 0.1%, 0.5%, 1%, 5%, 10%, 15%, 20%, 25%, 30%, 35%, 40%, 45%, 50%, 60%, 70%, 80%, 90%, 95%, 96%, 97%, 98%, or 99% viral capsid protein (e.g., about 0.05% viral capsid protein). In embodiments, the viral capsid protein is Complex of Rabbit Endogenous Lentivirus (RELIK) Capsid with Cyclophilin A. In embodiments, the viral capsid protein: total protein ratio is (or is identified as being) about 0.01, 0.02, 0.03, 0.04, 0.05, 0.06, 0.07, 0.08, 0.09, or 0.1.

[0440] In some embodiments, the fusosome does not comprise (or is identified as not comprising) a gag protein or a fragment or variant thereof, or the amount of gag protein or fragment or variant thereof is less than 10%, 5%, 4%, 3%, 2%, 1%, 0.5%, 0.2%, or 0.1% of total protein, e.g., by an assay of Example 93.

[0441] In embodiments, the ratio of the copy number of the fusogen to the copy number of viral structural protein on the fusosome is at least 1,000,000:1, 100,000:1, 10,000:1, 1,000:1, 100:1, 50:1, 20:1, 10:1, 5:1, or 1:1; or is between 100:1 and 50:1, 50:1 and 20:1, 20:1 and 10:1, 10:1 and 5:1 or 1:1. In embodiments, the ratio of the copy number of the fusogen to the copy number of viral matrix protein on the fusosome is at least 1,000,000:1, 100.000:1, 10,000:1, 1,000:1, 100:1, 50:1, 20:1, 10:1, 5:1, or 1:1.

[0442] In embodiments, one or more of: i) the fusosome does not comprise a water-immiscible droplet; ii) the fusosome comprises an aqueous lumen and a hydrophilic exterior; iii) the fusogen is a protein fusogen; or iv) the organelle is selected from a mitochondrion, Golgi apparatus, lysosome, endoplasmic reticulum, vacuole, endosome, acrosome, autophagosome, centriole, glycosome, glyoxysome, hydrogenosome, melanosome, mitosome, cnidocyst, peroxisome, proteasome, vesicle, and stress granule.

[0443] In embodiments, one or more of: i) the fusogen is a mammalian fusogen or a viral fusogen; ii) the fusosome was not made by loading the fusosome with a therapeutic or diagnostic substance; iii) the source cell was not loaded with a therapeutic or diagnostic substance; iv) the fusosome does not comprise doxorubicin, dexamethasone, cyclodextrin; polyethylene glycol, a micro RNA e.g., miR125, VEGF receptor, ICAM-1, E-selectin, iron oxide, a fluorescent protein e.g., GFP or RFP, a nanoparticle, or an RNase, or does not comprise an exogenous form of any of the foregoing; or v) the fusosome further comprises an exogenous therapeutic agent having one or more post-translational modifications, e.g., glycosylation.

[0444] In embodiments, the fusosome is unilamellar or multilamellar.

[0445] In embodiments, one or more of: i) the fusosome is not an exosome; ii) the fusosome is a microvesicle; iii) the fusosome comprises a non-mammalian fusogen; iv) the fusosome has been engineered to incorporate a fusogen; v) the fusosome comprises an exogenous fusogen; vi) the fusosome has a size of at least 80 nm, 100 nm, 200 nm, 500 nm, 1000 nm, 1200 nm, 1400 nm, or 1500 nm, or a population of fusosomes has an average size of at least 80 nm, 100 nm, 200 nm, 500 nm, 1000 nm, 1200 nm, 1400 nm, or 1500 nm; vii) the fusosome comprises one or more organelles, e.g., a mitochondrion, Golgi apparatus, lysosome, endoplasmic reticulum, vacuole, endosome, acrosome, autophagosome, centriole, glycosome, glyoxysome, hydrogenosome, melanosome, mitosome, cnidocyst, peroxisome, proteasome, vesicle, and stress granule; viii) the fusosome comprises a cytoskeleton or a component thereof, e.g., actin, Arp2/3, formin, coronin, dystrophin, keratin, myosin, or tubulin; ix) the fusosome, or a composition or preparation comprising a plurality of the fusosomes, does not have a flotation density of 1.08-1.22 g/ml, or has a density of at least 1.18-1.25 g/ml, or 1.05-1.12 g/ml, e.g., in a sucrose gradient centrifugation assay, e.g., as described in Théry et al., “Isolation and characterization of exosomes from cell culture supernatants and biological fluids.” Curr Protoc Cell Biol. 2006 April; Chapter 3:Unit 3.22; x)the lipid bilayer is enriched for ceramides or sphingomyelins or a combination thereof compared to the source cell, or the lipid bilayer is not enriched (e.g., is depleted) for glycolipids, free fatty acids, or phosphatidylserine, or a combination thereof, compared to the source cell; xi) the fusosome comprises Phosphatidyl serine (PS) or CD40 ligand or both of PS and CD40 ligand, e.g., when measured in an assay of Example 92; xii) the fusosome is enriched for PS compared to the source cell, e.g., in a population of fusosomes at least 5%, 10%, 20%, 30%, 40%, 50%, 60%, 70%, 80%, or 90% are positive for PS, e.g., by an assay of Kanada M, et al. (2015) Differential fates of biomolecules delivered to target cells via extracellular vesicles. Proc Natl Acad Sci USA 112:E1433-E1442; xiii) the fusosome is substantially free of acetylcholinesterase (AChE), or contains less than 0.001, 0.002, 0.005, 0.01, 0.02, 0.05, 0.1, 0.2, 0.5, 1, 2, 5, 10, 20, 50, 100, 200, 500, or 1000 AChE activity units/ug of protein, e.g., by an assay of Example 52; xiv) the fusosome is substantially free of a Tetraspanin family protein (e.g., CD63, CD9, or CD81), an ESCRT-related protein (e.g., TSG101, CHMP4A-B, or VPS4B), Alix, TSG101, MHCI, MHCII, GP96, actinin-4, mitofilin, syntenin-1, TSG101, ADAM10, EHD4, syntenin-1, TSG101, EHD1, flotillin-1, heat-shock 70-kDa proteins (HSC70/HSP73, HSP70/HSP72), or any combination thereof, or contains less than 0.05%, 0.1%, 0.5%, 1%, 2%, 3%, 4%, 5%, 5%, or 10% of any individual exosomal marker protein and/or less than 0.05%, 0.1%, 0.5%, 1%, 2%, 3%, 4%, 5%, 10%, 15%, 20%, or 25% of total exosomal marker proteins of any of said proteins, or is de-enriched for any one or more of these proteins compared to the source cell, or is not enriched for any one or more of these proteins, e.g., by an assay of Example 89; xv) the fusosome comprises a level of Glyceraldehyde 3-phosphate dehydrogenase (GAPDH) that is below 500, 250, 100, 50, 20, 10, 5, or 1 ng GAPDH/ug total protein or below the level of GAPDH in the source cell, e.g., less than 1%, 2.5%, 5%, 10%, 15%, 20%, 30%, 40%, 50%, 60%, 70%, 80%, or 90%, less than the level of GAPDH per total protein in ng/ug in the source cell, e.g., using an assay of Example 36; xvi) the fusosome is enriched for one or more endoplasmic reticulum proteins (e.g., calnexin), one or more proteasome proteins, or one or more mitochondrial proteins, or any combination thereof, e.g., wherein the amount of calnexin is less than 500, 250, 100, 50, 20, 10, 5, or 1 ng Calnexin/ug total protein, or wherein the fusosome comprises less Calnexin per total protein in ng/ug compared to the source cell by 1%, 2.5%, 5%, 10%, 15%, 20%, 30%, 40%, 50%, 60%, 70%, 80%, or 90%, e.g., using an assay of Example 37 or 90, or wherein the average fractional content of Calnexin in the fusosome is less than about 1×10⁻⁴, 1.5×10⁻⁴, 2×10⁻⁴, 2.1×10⁻⁴, 2.2×10⁻⁴, 2.3×10⁻⁴, 2.4×10⁻⁴, 2.43×10⁻⁴, 2.5×10⁴, 2.6×10⁻⁴, 2.7×10⁻⁴, 2.8×10⁻⁴, 2.9×10⁻⁴, 3×10⁻⁴, 3.5×10⁻⁴, or 4×10⁻⁴, or wherein the fusosome comprises an amount of Calnexin per total protein that is lower than that of the parental cell by about 70%, 75%, 80%, 85%, 88%, 90%, 95%, 99%, or more; xvii) the fusosome comprises an exogenous agent (e.g., an exogenous protein, mRNA, or siRNA) e.g., as measured using an assay of Example 34; or xviii) the fusosome can be immobilized on a mica surface by atomic force microscopy for at least 30 min, e.g., by an assay of Kanada M, et al. (2015) Differential fates of biomolecules delivered to target cells via extracellular vesicles. Proc Natl Acad Sci USA 112:E1433-E1442.

[0446] In embodiments, one or more of: i) the fusosome is an exosome; ii) the fusosome is not a microvesicle; iii) the fusosome has a size of less than 80 nm, 100 nm, 200 nm, 500 nm, 1000 nm, 1200 nm, 1400 nm, or 1500 nm, or a population of fusosomes has an average size of less than 80 nm, 100 nm, 200 nm, 500 nm, 1000 nm, 1200 nm, 1400 nm, or 1500 nm; iv) the fusosome does not comprise an organelle; v) the fusosome does not comprise a cytoskeleton or a component thereof, e.g., actin, Arp2/3, formin, coronin, dystrophin, keratin, myosin, or tubulin; vi) the fusosome, or a composition or preparation comprising a plurality of the fusosomes, has flotation density of 1.08-1.22 g/ml, e.g., in a sucrose gradient centrifugation assay, e.g., as described in Théry et al., “Isolation and characterization of exosomes from cell culture supernatants and biological fluids.” Curr Protoc Cell Biol. 2006 April; Chapter 3:Unit 3.22; vii) the lipid bilayer is not enriched (e.g., is depleted) for ceramides or sphingomyelins or a combination thereof compared to the source cell, or the lipid bilayer is enriched for glycolipids, free fatty acids, or phosphatidylserine, or a combination thereof, compared to the source cell; viii) the fusosome does not comprise, or is depleted for relative to the source cell, Phosphatidyl serine (PS) or CD40 ligand or both of PS and CD40 ligand, e.g., when measured in an assay of Example 92; ix) the fusosome is not enriched (e.g., is depleted) for PS compared to the source cell, e.g., in a population of fusosomes less than 20%, 30%, 40%, 50%, 60%, 70%, 80%, or 90% are positive for PS, e.g., by an assay of Kanada M, et al. (2015) Differential fates of biomolecules delivered to target cells via extracellular vesicles. Proc Natl Acad Sci USA 112:E1433-E1442; x) the fusosome comprises acetylcholinesterase (AChE), e.g. at least 0.001, 0.002, 0.005, 0.01,0.02, 0.05, 0.1, 0.2, 0.5, 1, 2, 5, 10, 20, 50, 100, 200, 500, or 1000 AChE activity units/ug of protein, e.g., by an assay of Example 52; xi) the fusosome comprises a Tetraspanin family protein (e.g., CD63, CD9, or CD81), an ESCRT-related protein (e.g., TSG101, CHMP4A-B, or VPS4B), Alix, TSG101, MHCI, MHCII, GP96, actinin-4, mitofilin, syntenin-1, TSG101, ADAM10, EHD4, syntenin-1, TSG101, EHD1, flotillin-1, heat-shock 70-kDa proteins (HSC70/HSP73, HSP70/HSP72), or any combination thereof, e.g., contains more than 0.05%, 0.1%, 0.5%, 1%, 2%, 3%, 4%, 5%, 5%, or 10% of any individual exosomal marker protein and/or less than 0.05%, 0.1%, 0.5%, 1%, 2%, 3%, 4%, 5%, 10%, 15%, 20%, or 25% of total exosomal marker proteins of any of said proteins, or is enriched for any one or more of these proteins compared to the source cell, e.g., by an assay of Example 89; xii) the fusosome comprises a level of Glyceraldehyde 3-phosphate dehydrogenase (GAPDH) that is above 500, 250, 100, 50, 20, 10, 5, or 1 ng GAPDH/ug total protein or below the level of GAPDH in the source cell, e.g., at least 1%, 2.5%, 5%, 10%, 15%, 20%, 30%, 40%, 50%, 60%, 70%, 80%, or 90%, greater than the level of GAPDH per total protein in ng/ug in the source cell, e.g., using an assay of Example 36; xiii) the fusosome is not enriched for (e.g., is depleted for) one or more endoplasmic reticulum proteins (e.g., calnexin), one or more proteasome proteins, or one or more mitochondrial proteins, or any combination thereof, e.g., wherein the amount of calnexin is less than 500, 250, 100, 50, 20, 10, 5, or 1 ng Calnexin/ug total protein, or wherein the fusosome comprises less Calnexin per total protein in ng/ug compared to the source cell by 1%, 2.5%, 5%, 10%, 15%, 20%, 30%, 40%, 50%, 60%, 70%, 80%, or 90%, e.g., using an assay of Example 90, or wherein the average fractional content of Calnexin in the fusosome is less than about 1×10⁻⁴, 1.5×10⁻⁴, 2×10⁻⁴, 2.1×10⁻⁴, 2.2×10⁻⁴, 2.3×10₋₄, 2.4×10⁻⁴, 2.43×10⁻⁴, 2.5×10⁻⁴, 2.6×10⁻⁴, 2.7×10⁻⁴, 2.8×10⁻⁴, 2.9×10⁻⁴, 3×10⁻⁴, 3.5×10⁻⁴, or 4×10⁻⁴, or wherein the fusosome comprises an amount of Calnexin per total protein that is lower than that of the parental cell by about 70%, 75%, 80%, 85%, 88%, 90%, 95%, 99%, or more; or xiv) the fusosome can not be immobilized on a mica surface by atomic force microscopy for at least 30 min, e.g., by an assay of Kanada M, et al. (2015) Differential fates of biomolecules delivered to target cells via extracellular vesicles. Proc Natl Acad Sci USA 112:E1433-E1442.

[0447] In embodiments, one or more of: i) the fusosome does not comprise a VLP; ii) the fusosome does not comprise a virus; iii) the fusosome does not comprise a replication-competent virus; iv) the fusosome does not comprise a viral protein, e.g., a viral structural protein, e.g., a capsid protein or a viral matrix protein; v) the fusosome does not comprise a capsid protein from an enveloped virus; vi) the fusosome does not comprise a nucleocapsid protein; or vii) the fusogen is not a viral fusogen.

[0448] In embodiments, the fusosome comprises cytosol.

[0449] In embodiments, one or more of: i) the fusosome or the source cell does not form a teratoma when implanted into subject, e.g., by an assay of Example 65; ii) the fusosome is capable of chemotaxis, e.g., of within 1%, 2%, 3%, 4%, 5%, 10%, 20%, 30%, 40%, 50%, 60%, 70%, 80%, 90%, 100% or greater than a reference cell, e.g., a macrophage, e.g., using an assay of Example 45; iii) the fusosome is capable of homing, e.g., at the site of an injury, wherein the fusosome or cytobiologic is from a human cell, e.g., using an assay of Example 46, e.g., wherein the source cell is a neutrophil; or iv) the fusosome is capable of phagocytosis, e.g., wherein phagocytosis by the fusosome is detectable within 0.5, 1, 2, 3, 4, 5, or 6 hours in using an assay of Example 47, e.g., wherein the source cell is a macrophage.

[0450] In embodiments, the fusosome or fusosome composition retains one, two, three, four, five, six or more of any of the characteristics for 5 days or less, e.g., 4 days or less, 3 days or less, 2 days or less, 1 day or less, e.g., about 12-72 hours, after administration into a subject, e.g., a human subject.

[0451] In embodiments, the fusosome has one or more of the following characteristics: a) comprises one or more endogenous proteins from a source cell, e.g., membrane proteins or cytosolic proteins; b) comprises at least 10, 20, 50, 100, 200, 500, 1000, 2000, or 5000 different proteins; c) comprises at least 1, 2, 5, 10, 20, 50, or 100 different glycoproteins; d) at least 10%, 20%, 30%, 40%, 50%, 60%, 70%, 80%, or 90% by mass of the proteins in the fusosome are naturally-occurring proteins; e) comprises at least 10, 20, 50, 100, 200, 500, 1000, 2000, or 5000 different RNAs; or f) comprises at least 2, 3, 4, 5, 10, or 20 different lipids, e.g., selected from CL, Cer, DAG, HexCer, LPA, LPC, LPE, LPG, LPI, LPS, PA, PC, PE, PG, PI, PS, CE, SM and TAG.

[0452] In embodiments, the fusosome has been manipulated to have, or the fusosome is not a naturally occurring cell and has, or wherein the nucleus does not naturally have one, two, three, four, five or more of the following properties: a) the partial nuclear inactivation results in a reduction of at least 50%, 60%, 70%, 80%, 90% or more in nuclear function, e.g., a reduction in transcription or DNA replication, or both, e.g., wherein transcription is measured by an assay of Example 24 and DNA replication is measured by an assay of Example 25; b) the fusosome is not capable of transcription or has transcriptional activity of less than 1%, 2.5% 5%, 10%, 20%, 30%, 40%, 50%, 60%, 70%, 80%, or 90% of that of the transcriptional activity of a reference cell, e.g., the source cell, e.g., using an assay of Example 24; c) the fusosome is not capable of nuclear DNA replication or has nuclear DNA replication of less than 1%, 2.5% 5%, 10%, 20%, 30%, 40%, 50%, 60%, 70%, 80%, or 90% of the nuclear DNA replication of a reference cell, e.g., the source cell, e.g., using an assay of Example 25; d) the fusosome lacks chromatin or has a chromatin content of less than 1%, 2.5% 5%, 10%, 20%, 30%, 40%, 50%, 60%, 70%, 80%, or 90% of the of the chromatin content of a reference cell, e.g., the source cell, e.g., using an assay of Example 32; e) the fusosome lacks a nuclear membrane or has less than 50%, 40%, 30%, 20%, 10%, 5%, 4%, 3%, 2%, or 1% the amount of nuclear membrane of a reference cell, e.g., the source cell or a Jurkat cell, e.g., by an assay of Example 31; f) the fusosome lacks functional nuclear pore complexes or has reduced nuclear import or export activity, e.g., by at least 50%, 40%, 30%, 20%, 10%, 5%, 4%, 3%, 2%, or 1% by an assay of Example 31, or the fusosome lacks on or more of a nuclear pore protein, e.g., NUP98 or Importin 7; g) the fusosome does not comprise histones or has histone levels less than 1%, 2%, 3%, 4%, 5%, 10%, 20%, 30%, 40%, 50%, 60%, 70%, 80%, or 90% of the histone level of the source cell (e.g., of H1, H2a, H2b, H3, or H4), e.g., by an assay of Example 32; h) the fusosome comprises less than 20, 10, 5, 4, 3, 2, or 1 chromosome; i) nuclear function is eliminated; j) the fusosome is an enucleated mammalian cell; k) the nucleus is removed or inactivated, e.g., extruded by mechanical force, by radiation or by chemical ablation; or l) the fusosome is from a mammalian cell having DNA that is completely or partially removed, e.g., during interphase or mitosis.

[0453] In embodiments, the fusosome comprises mtDNA or vector DNA. In embodiments, the fusosome does not comprise DNA.

[0454] In embodiments, the source cell is a primary cell, immortalized cell or a cell line (e.g., myelobast cell line, e.g., C2C12). In embodiments, the fusosome is from a source cell having a modified genome, e.g., having reduced immunogenicity (e.g., by genome editing, e.g., to remove an MHC protein or MHC complexes). In embodiments, the source cell is from a cell culture treated with an anti-inflammatory signal. In embodiments, the source cell is from a cell culture treated with an immunosuppressive agent. In embodiments, the source cell is substantially non-immunogenic, e.g., using an assay described herein. In embodiments, the source cell comprises an exogenous agent, e.g., a therapeutic agent. In embodiments, the source cell is a recombinant cell.

[0455] In embodiments, the fusosome further comprises an exogenous agent, e.g., a therapeutic agent, e.g., a protein or a nucleic acid (e.g., a DNA, a chromosome (e.g. a human artificial chromosome), an RNA, e.g., an mRNA or miRNA). In embodiments, the exogenous agent is present at at least, or no more than, 10, 20, 50, 100, 200, 500, 1,000, 2,000, 5,000, 10,000, 20,000, 50,000, 100,000, 200,000, 500,000, 1,000,000, 5,000,000, 10,000,000, 50,000,000, 100,000,000, 500,000,000, or 1,000,000,000 copies, e.g., comprised by the fusosome, or is present at an average level of at least, or no more than, 10, 20, 50, 100, 200, 500, 1,000, 2,000, 5,000, 10,000, 20,000, 50,000, 100,000, 200,000, 500,000 or 1,000,000 copies per fusosome. In embodiments, the fusosome has an altered, e.g., increased or decreased level of one or more endogenous molecules, e.g., protein or nucleic acid, e.g., due to treatment of the mammalian cell with a siRNA or gene editing enzyme. In embodiments, the endogenous molecule is present at, e.g. an average level, of at least, or no more than, 10, 20, 50, 100, 200, 500, 1,000, 2,000, 5,000, 10,000, 20,000, 50,000, 100,000, 200,000, 500,000, 1,000,000, 5,000,000, 10,000,000, 50,000,000, 100,000,000, 500,000,000, or 1,000,000,000 copies (e.g., copies comprised by the fusosome), or is present at an average level of at least, or no more than, 10, 20, 50, 100, 200, 500, 1,000, 2,000, 5,000, 10,000, 20,000, 50,000, 100,000, 200,000, 500,000 or 1,000,000 copies per fusosome. In embodiments, the endogenous molecule (e.g., an RNA or protein) is present at a concentration of at least 1, 2, 3, 4, 5, 10, 20, 50, 100, 500, 10³, 5.0×10³, 10⁴, 5.0×10⁴, 10⁵, 5.0×10⁵, 10⁶, 5.0×10⁶, 1.0×10⁷, 5.0×10⁷, or 1.0×10⁸, greater than its concentration in the source cell.

[0456] In embodiments, the active agent is selected from a protein, protein complex (e.g., comprising at least 2, 3, 4, 5, 10, 20, or 50 proteins, e.g., at least at least 2, 3, 4, 5, 10, 20, or 50 different proteins) polypeptide, nucleic acid (e.g., DNA, chromosome, or RNA, e.g., mRNA, siRNA, or miRNA) or small molecule. In embodiments, the exogenous agent comprises a site-specific nuclease, e.g., Cas9 molecule, TALEN, or ZFN.

[0457] In embodiments, the fusogen is a viral fusogen, e.g., HA, HIV-1 ENV, HHV-4, gp120, or VSV-G. In embodiments, the fusogen is a mammalian fusogen, e.g., a SNARE, a Syncytin, myomaker, myomixer, myomerger, or FGFRL1. In embodiments, the fusogen is active at a pH of 4-5, 5-6, 6-7, 7-8, 8-9, or 9-10. In embodiments, the fusogen is not active at a pH of 4-5, 5-6, 6-7, 7-8, 8-9, or 9-10. In embodiments, the fusosome fuses to a target cell at the surface of the target cell. In embodiments, the fusogen promotes fusion in a lysosome-independent manner. In embodiments, the fusogen is a protein fusogen. In embodiments, the fusogen is a lipid fusogen, e.g., oleic acid, glycerol mono-oleate, a glyceride, diacylglycerol, or a modified unsaturated fatty acid. In embodiments, the fusogen is a chemical fusogen, e.g., PEG. In embodiments, the fusogen is a small molecule fusogen, e.g., halothane, an NSAID such as meloxicam, piroxicam, tenoxicam, and chlorpromazine. In embodiments, the fusogen is recombinant. In embodiments, the fusogen is biochemically incorporated, e.g., the fusogen is provided as a purified protein and contacted with a lipid bilayer under conditions that allow for associate of the fusogen with the lipid bilayer. In embodiments, the fusogen is biosynthetically incorporated, e.g. expressed in a source cell under conditions that allow the fusogen to associate with the lipid bilayer.

[0458] In embodiments, the fusosome binds a target cell. In embodiments, the target cell is other than a HeLa cell, or the target cell is not transformed or immortalized.

[0459] In some embodiments involving fusosome compositions, the plurality of fusosomes are the same. In some embodiments, the plurality of fusosomes are different. In some embodiments the plurality of fusosomes are from one or more source cells. In some embodiments at least 50%, 60%, 70%, 80%, 90%, 95%, or 99% of fusosomes in the plurality have a diameter within 10%, 20%, 30%, 40%, or 50% of the mean diameter of the fusosomes in the fusosome composition. In some embodiments at least 50%, 60%, 70%, 80%, 90%, 95%, or 99% of fusosomes in the plurality have a volume within 10%, 20%, 30%, 40%, or 50% of the mean volume of the fusosomes in the fusosome composition. In some embodiments, the fusosome composition has less than about 90%, 80%, 70%, 60%, 50%, 40%, 30%, 20%, 10%, 5%, variability in size distribution within 10%, 50%, or 90% of the source cell population variability in size distribution, e.g., based on Example 28. In some embodiments, at least 50%, 60%, 70%, 80%, 90%, 95%, or 99% of fusosomes in the plurality have a copy number of the fusogen within 10%, 20%, 30%, 40%, 50%, 60%, 70%, 80%, or 90% of the mean fusogen copy number in the fusosomes in the fusosome composition. In some embodiments, at least 50%, 60%, 70%, 80%, 90%, 95%, or 99% of fusosomes in the plurality have a copy number of the therapeutic agent within 10%, 20%, 30%, 40%, 50%, 60%, 70%, 80%, or 90% of the mean therapeutic agent copy number in the fusosomes in the fusosome composition. In some embodiments, the fusosome composition comprises at least 10⁵, 10⁶, 10⁷, 10⁸, 10⁹, 10¹⁰, 10¹¹, 10¹², 10¹³, 10¹⁴, or 10¹⁵ or more fusosomes. In some embodiments, the fusosome composition is in a volume of at least 1 ul, 2 ul, 5 ul, 10 ul, 20 ul, 50 ul, 100 ul, 200 ul, 500 ul, 1 ml, 2 ml, 5 ml, or 10 ml.

[0460] In some embodiments, the fusosome composition delivers the cargo to at least 40%, 45%, 50%, 55%, 60%, 65%, 70%, 75%, 80%, 85%, 90%, 95%, 96%, 97%, 98%, or 99% of the number of cells in the target cell population compared to the reference target cell population.

[0461] In some embodiments, the fusosome composition delivers at least 40%, 45%, 50%, 55%, 60%, 65%, 70%, 75%, 80%, 85%, 90%, 95%, 96%, 97%, 98%, or 99% of the cargo to the target cell population compared to the reference target cell population or to a non-target cell population. In some embodiments, the fusosome composition delivers at least 40%, 45%, 50%, 55%, 60%, 65%, 70%, 75%, 80%, 85%, 90%, 95%, 96%, 97%, 98%, or 99% more of the cargo to the target cell population compared to the reference target cell population or to a non-target cell population.

[0462] In some embodiments, less than 10% of cargo enters the cell by endocytosis.

[0463] In some embodiments, the inhibitor of endocytosis is an inhibitor of lysosomal acidification, e.g., bafilomycin A1. In some embodiments, the inhibitor of endocytosis is a dynamin inhibitor, e.g., Dynasore.

[0464] In some embodiments, the target cell population is at a physiological pH (e.g., between 7.3-7.5, e.g., between 7.38-7.42).

[0465] In some embodiments, the cargo delivered is determined using an endocytosis inhibition assay, e.g., an assay of Example 80.

[0466] In some embodiments, cargo enters the cell through a dynamin-independent pathway or a lysosomal acidification-independent pathway, a macropinocytosis-independent pathway (e.g., wherein the inhibitor of endocytosis is an inhibitor of macropinocytosis, e.g., 5-(N-ethyl-N-isopropyl)amiloride (EIPA), e.g., at a concentration of 25 μM), or an actin-independent pathway (e.g., wherein the inhibitor of endocytosis is an inhibitor of actin polymerization is, e.g., Latrunculin B, e.g., at a concentration of 6 μM).

[0467] In some embodiments, the fusosomes of the plurality further comprise a targeting moiety. In embodiments, the targeting moiety is comprised by the fusogen or is comprised by a separate molecule.

[0468] In some embodiments, when the plurality of fusosomes are contacted with a cell population comprising target cells and non-target cells, the cargo is present in at least 10-fold more target cells than non-target cells.

[0469] In some embodiments, when the plurality of fusosomes are contacted with a cell population comprising target cells and non-target cells, the cargo is present at least 2-fold, 5-fold, 10-fold, 20-fold, or 50-fold higher in target cells than non-target cells and/or the cargo is present at least 2-fold, 5-fold, 10-fold, 20-fold, or 50-fold higher in target cells than reference cells.

[0470] In some embodiments, the fusosomes of the plurality fuse at a higher rate with a target cell than with a non-target cell by at least 50%.

[0471] In some embodiments, the fusosome, when contacted with a target cell population, delivers cargo to a target cell location other than an endosome or lysosome, e.g., to the cytosol. In embodiments, less 50%, 40%, 30%, 20%, or 10% of the cargo is delivered to an endosome or lysosome.

[0472] In some embodiments, the fusosomes of the plurality comprise exosomes, microvesicles, or a combination thereof.

[0473] In some embodiments, the plurality of fusosomes has an average size of at least 50 nm, 100 nm, 200 nm, 500 nm, 1000 nm, 1200 nm, 1400 nm, or 1500 nm. In other embodiments, the plurality of fusosomes has an average size of less than 100 nm, 80 nm, 60 nm, 40 nm, or 30 nm.

[0474] In some embodiments, the fusogen (e.g., re-targeted fusogen) comprises a mammalian fusogen. In some embodiments, the fusogen (e.g., re-targeted fusogen) comprises a viral fusogen. In some embodiments, the fusogen (e.g., re-targeted fusogen) is a protein fusogen. In some embodiments, the fusogen (e.g., re-targeted fusogen) comprises a sequence chosen from a Nipah virus protein F, a measles virus F protein, a tupaia paramyxovirus F protein, a paramyxovirus F protein, a Hendra virus F protein, a Henipavirus F protein, a Morbilivirus F protein, a respirovirus F protein, a Sendai virus F protein, a rubulavirus F protein, or an avulavirus F protein, or a derivative thereof.

[0475] In some embodiments, the fusogen (e.g., re-targeted fusogen) is active at a pH of 4-5, 5-6, 6-7, 7-8, 8-9, or 9-10. In some embodiments, the fusogen (e.g., re-targeted fusogen) is not active at a pH of 4-5, 5-6, 6-7, 7-8, 8-9, or 9-10.

[0476] In some embodiments, the fusogen is present at a copy number of at least 1, 2, 5, or 10 copies per fusosome.

[0477] In some embodiments, the fusogen (e.g., re-targeted fusogen) comprises a Nipah virus protein G, a measles protein H, a tupaia paramyxovirus H protein, a paramyxovirus G protein, a paramyxovirus H protein, a paramyxovirus HN protein, a Morbilivirus H protein, a respirovirus HN protein, a sendai HN protein, a rubulavirus HN protein, an avulavirus HN protein, or a derivative thereof. In some embodiments, the fusogen (e.g., re-targeted fusogen) comprises a sequence chosen from Nipah virus F and G proteins, measles virus F and H proteins, tupaia paramyxovirus F and H proteins, paramyxovirus F and G proteins or F and H proteins or F and HN proteins, Hendra virus F and G proteins, Henipavirus F and G proteins, Morbilivirus F and H proteins, respirovirus F and HN protein, a Sendai virus F and HN protein, rubulavirus F and HN proteins, or avulavirus F and HN proteins, or a derivative thereof, or any combination thereof.

[0478] In some embodiments, the cargo comprises an exogenous protein or an exogenous nucleic acid. In some embodiments, the cargo comprises or encodes a cytosolic protein. In some embodiments the cargo comprises or encodes a membrane protein. In some embodiments, the cargo comprises a therapeutic agent. In some embodiments, the cargo is present at a copy number of at least 1, 2, 5, 10, 20, 50, 100, or 200 copies per fusosome (e.g., up to about 1,000 copies per fusosome). In some embodiments, the ratio of the copy number of the fusogen (e.g., re-targeted fusogen) to the copy number of the cargo is between 1000:1 and 1:1, or between 500:1 and 1:1 or between 250:1 and 1:1, or between 150:1 and 1:1, or between 100:1 and 1:1, or between 75:1 and 1:1 or between 50:1 and 1:1 or between 25:1 and 1:1 or between 20:1 and 1:1 or between 15:1 and 1:1 or between 10:1 and 1:1 or between 5:1 and 1:1 or between 2:1 and 1:1 or between 1:1 and 1:2.

[0479] In some embodiments, the fusosome composition comprises a viral capsid protein or a DNA integration polypeptide. In some embodiments, the cargo comprises a viral genome.

[0480] In some embodiments, the fusosome composition is capable of delivering a nucleic acid to a target cell, e.g., to stably modify the genome of the target cell, e.g., for gene therapy.

[0481] In some embodiments, the fusosome composition does not comprise a viral nucleocapsid protein, or the amount of viral nucleocapside protein is less than 10%, 5%, 4%, 3%, 2%, 1%, 0.5%, 0.2%, or 0.1% of total protein, e.g., by mass spectrometry, e.g. using an assay of Example 93.

[0482] In embodiments, the fusosome composition comprises at least 10⁵, 10⁶, 10⁷, 10⁸, 10⁹, 10¹⁰, 10¹¹, 10¹², 10¹³, 10¹⁴, or 10¹⁵ fusosomes. In embodiments, the fusosome composition comprises at least 10 ml, 20 ml, 50 ml, 100 ml, 200 ml, 500 ml, 1 L, 2 L, 5 L, 10 L, 20 L, or 50 L.

[0483] In embodiments, the fusosome is from a mammalian cell having a modified genome, e.g., to reduce immunogenicity (e.g., by genome editing, e.g., to remove an MHC protein or MHC complexes). In embodiments, the source cell is from a cell culture treated with an anti-inflammatory signal. In embodiments, the method further comprises contacting the source cell of step a) with an immunosuppressive agent or anti-inflammatory signal, e.g., before or after inactivating the nucleus, e.g., enucleating the cell.

[0484] In one aspect, provided herein is a fusosome composition comprising a plurality of fusosomes derived from a source cell, wherein the fusosomes of the plurality comprise: (a) a lipid bilayer, (b) a lumen comprising cytosol, wherein the lumen is surrounded by the lipid bilayer; (c) an exogenous or overexpressed fusogen disposed in the lipid bilayer, (d) a cargo; and wherein the fusosome does not comprise a nucleus; wherein the amount of viral capsid protein in the fusosome composition is less than 1% of total protein; wherein the plurality of fusosomes, when contacted with a target cell population in the presence of an inhibitor of endocytosis, and when contacted with a reference target cell population not treated with the inhibitor of endocytosis, delivers the cargo to at least 30% of the number of cells in the target cell population compared to the reference target cell population.

[0485] In embodiments, the fusosome composition delivers the cargo to at least 40%, 50%, 60%, 70%, or 80% of the number of cells in the target cell population compared to the reference target cell population or to a non-target cell population; or delivers the cargo, e.g., at least 40%, 50%, 60%, 70%, or 80% of the cargo, to the target cell population compared to the reference target cell population or to a non-target cell population. In embodiments, less than 10% of cargo enters the cell by endocytosis. In embodiments, the inhibitor of endocytosis is an inhibitor of lysosomal acidification, e.g., bafilomycin Al. In embodiments, cargo delivered is determined using an endocytosis inhibition assay, e.g., an assay of Example 80. In embodiments, cargo enters the cell through a dynamin-independent pathway or a lysosomal acidification-independent pathway, a macropinocytosis-independent pathway (e.g., wherein the inhibitor of endocytosis is an inhibitor of macropinocytosis, e.g., 5-(N-ethyl-N-isopropyl)amiloride (EIPA), e.g., at a concentration of 25 μM), or an actin-independent pathway (e.g., wherein the inhibitor of endocytosis is an inhibitor of actin polymerization is, e.g., Latrunculin B, e.g., at a concentration of 6 μM).

[0486] C. Fusogens and Pseudotyping

[0487] In some embodiments, the fusosome described herein (e.g., comprising a vesicle or a portion of a cell) includes one or more fusogens, e.g., to facilitate the fusion of the fusosome to a membrane, e.g., a cell membrane. Also these compositions may include surface modifications made during or after synthesis to include one or more fusogens. The surface modification may comprise a modification to the membrane, e.g., insertion of a lipid or protein into the membrane.

[0488] In some embodiments, the fusosomes comprise one or more fusogens on their exterior surface (e.g., integrated into the cell membrane) to target a specific cell or tissue type (e.g.,CNS cell). In some embodiments, the specific cell type targeted by the one or more fusogens is a CNS cell, a pan-neuronal cell, a GABAergic neuron, a Glutamatergic neuron, a Cholinergic neuron, a Dopaminergic neuron, a Serotonergic neuron, a glial cell, an astrocyte, a microglial cell, an oligodendrocyte, or a choroid plexus cell. Fusosomes may comprise a targeting domain. Fusogens include without limitation protein based, lipid based, and chemical based fusogens. The fusogen may bind a partner, e.g., a feature on a target cells' surface. In some embodiments the partner on a target cells' surface is a target cell moiety. In particular embodiments, a fusogen is a fusogen or a re-targeted fusogen that binds to a target cell from among a CNS cell a pan-neuronal cell, a GABAergic neuron, a Glutamatergic neuron, a Cholinergic neuron, a Dopaminergic neuron, a Serotonergic neuron, a glial cell, an astrocyte, a microglial cell, an oligodendrocyte, or a choroid plexus cell. In some embodiments, the fusosome comprising the fusogen will integrate the membrane into a lipid bilayer of a target cell. In some embodiments, one or more of the fusogens described herein may be included in the fusosome.

[0489] The fusosomes (e.g., retroviral vectors) described herein can comprise a fusogen, e.g., an endogenous fusogen or a pseudotyped fusogen.

[0490] i) Protein Fusogens

[0491] In some embodiments, the fusogen comprises a protein (e.g., glycoprotein), lipid, or small molecule. A fusogen can be, for instance, a mammalian fusogen or a viral fusogen. In some embodiments, the fusogen is a protein fusogen, e.g., a mammalian protein or a homologue of a mammalian protein (e.g., having 50%, 60%, 70%, 80%, 85%, 90%, 95%, 96%, 97%, 98%, 99%, or greater identity), a non-mammalian protein such as a viral protein or a homologue of a viral protein (e.g., having 50%, 60%, 70%, 80%, 85%, 90%, 95%, 96%, 97%, 98%, 99%, or greater identity), a native protein or a derivative of a native protein, a synthetic protein, a fragment thereof, a variant thereof, a protein fusion comprising one or more of the fusogens or fragments, and any combination thereof. In some embodiments, a viral fusogen is a Class I viral membrane fusion protein, a Class II viral membrane protein, a Class III viral membrane fusion protein, a viral membrane glycoprotein, or other viral fusion proteins, or a homologue thereof, a fragment thereof, a variant thereof, or a protein fusion comprising one or more proteins or fragments thereof.

[0492] In embodiments, the fusogen is a viral fusogen, e.g., HA, HIV-1 ENV, HHV-4, gp120, or VSV-G. In embodiments, the fusogen is a mammalian fusogen, e.g., a SNARE, a Syncytin, myomaker, myomixer, myomerger, or FGFRL1. In embodiments, the fusogen is active at a pH of 4-5, 5-6, 6-7, 7-8, 8-9, or 9-10. In embodiments, the fusogen is not active at a pH of 4-5, 5-6, 6-7, 7-8, 8-9, or 9-10. In embodiments, the fusosome fuses to a target cell at the surface of the target cell. In embodiments, the fusogen promotes fusion in a lysosome-independent manner. In embodiments, the fusogen is a protein fusogen. In embodiments, the fusogen is a lipid fusogen, e.g., oleic acid, glycerol mono-oleate, a glyceride, diacylglycerol, or a modified unsaturated fatty acid. In embodiments, the fusogen is a chemical fusogen, e.g., PEG. In embodiments, the fusogen is a small molecule fusogen, e.g., halothane, an NSAID such as meloxicam, piroxicam, tenoxicam, and chlorpromazine. In embodiments, the fusogen is recombinant. In embodiments, the fusogen is biochemically incorporated, e.g., the fusogen is provided as a purified protein and contacted with a lipid bilayer under conditions that allow for associate of the fusogen with the lipid bilayer. In embodiments, the fusogen is biosynthetically incorporated, e.g. expressed in a source cell under conditions that allow the fusogen to associate with the lipid bilayer.

[0493] In some embodiments, the fusogen (e.g., re-targeted fusogen) comprises a mammalian fusogen. In some embodiments, the fusogen (e.g., re-targeted fusogen) comprises a viral fusogen. In some embodiments, the fusogen (e.g., re-targeted fusogen) is a protein fusogen. In some embodiments, the fusogen (e.g., re-targeted fusogen) comprises a sequence chosen from a Nipah virus protein F, a measles virus F protein, a tupaia paramyxovirus F protein, a paramyxovirus F protein, a Hendra virus F protein, a Henipavirus F protein, a Morbilivirus F protein, a respirovirus F protein, a Sendai virus F protein, a rubulavirus F protein, or an avulavirus F protein, or a derivative thereof.

[0494] In some embodiments, the fusogen (e.g., re-targeted fusogen) is active at a pH of 4-5, 5-6, 6-7, 7-8, 8-9, or 9-10. In some embodiments, the fusogen (e.g., re-targeted fusogen) is not active at a pH of 4-5, 5-6, 6-7, 7-8, 8-9, or 9-10.

[0495] In some embodiments, the fusogen is present at a copy number of at least 1, 2, 5, or 10 copies per fusosome.

[0496] In some embodiments, the fusogen (e.g., re-targeted fusogen) comprises a Nipah virus protein G, a measles protein H, a tupaia paramyxovirus H protein, a paramyxovirus G protein, a paramyxovirus H protein, a paramyxovirus HN protein, a Morbilivirus H protein, a respirovirus HN protein, a sendai HN protein, a rubulavirus HN protein, an avulavirus HN protein, or a derivative thereof. In some embodiments, the fusogen (e.g., re-targeted fusogen) comprises a sequence chosen from Nipah virus F and G proteins, measles virus F and H proteins, tupaia paramyxovirus F and H proteins, paramyxovirus F and G proteins or F and H proteins or F and HN proteins, Hendra virus F and G proteins, Henipavirus F and G proteins, Morbilivirus F and H proteins, respirovirus F and HN protein, a Sendai virus F and HN protein, rubulavirus F and HN proteins, or avulavirus F and HN proteins, or a derivative thereof, or any combination thereof.

[0497] Non-mammalian fusogens include viral fusogens, homologues thereof, fragments thereof, and fusion proteins comprising one or more proteins or fragments thereof. Viral fusogens include class I fusogens, class II fusogens, class III fusogens, and class IV fusogens. In embodiments, class I fusogens such as human immunodeficiency virus (HIV) gp41, have a characteristic postfusion conformation with a signature trimer of a-helical hairpins with a central coiled-coil structure. Class I viral fusion proteins include proteins having a central postfusion six-helix bundle. Class I viral fusion proteins include influenza HA, parainfluenza F, HIV Env, Ebola GP, hemagglutinins from orthomyxoviruses, F proteins from paramyxoviruses (e.g. Measles, (Katoh et al. BMC Biotechnology 2010, 10:37)), ENV proteins from retroviruses, and fusogens of filoviruses and coronaviruses. In embodiments, class II viral fusogens such as dengue E glycoprotein, have a structural signature of β-sheets forming an elongated ectodomain that refolds to result in a trimer of hairpins. In embodiments, the class II viral fusogen lacks the central coiled coil. Class II viral fusogen can be found in alphaviruses (e.g., E1 protein) and flaviviruses (e.g., E glycoproteins). Class II viral fusogens include fusogens from Semliki Forest virus, Sinbis, rubella virus, and dengue virus. In embodiments, class III viral fusogens such as the vesicular stomatitis virus G glycoprotein, combine structural signatures found in classes I and II. In embodiments, a class III viral fusogen comprises α helices (e.g., forming a six-helix bundle to fold back the protein as with class I viral fusogens), and β sheets with an amphiphilic fusion peptide at its end, reminiscent of class II viral fusogens. Class III viral fusogens can be found in rhabdoviruses and herpesviruses. In embodiments, class IV viral fusogens are fusion-associated small transmembrane (FAST) proteins (doi:10.1038/sj.emboj.7600767, Nesbitt, Rae L., “Targeted Intracellular Therapeutic Delivery Using Liposomes Formulated with Multifunctional FAST proteins” (2012). Electronic Thesis and Dissertation Repository. Paper 388), which are encoded by nonenveloped reoviruses. In embodiments, the class IV viral fusogens are sufficiently small that they do not form hairpins (doi: 10.1146/annurev-cellbio-101512-122422, doi: 10.1016/j.devce1.2007.12.008).

[0498] Fusogens, which include viral envelope proteins (env), generally determine the range of host cells which can be infected and transformed by fusosomes. In the case of lentiviruses, such as HIV-1, HIV-2, SIV, FIV and EIV, the native env proteins include gp41 and gp120. In some embodiments, the viral env proteins expressed by source cells described herein are encoded on a separate vector from the viral gag and pol genes, as has been previously described.

[0499] Illustrative examples of retroviral-derived env genes which can be employed include, but are not limited to: MLV envelopes, 10A1 envelope, BAEV, FeLV-B, RD114, SSAV, Ebola, Sendai, FPV (Fowl plague virus), and influenza virus envelopes. Similarly, genes encoding envelopes from RNA viruses (e.g., RNA virus families of Picornaviridae, Calciviridae, Astroviridae, Togaviridae, Flaviviridae, Coronaviridae, Paramyxoviridae, Rhabdoviridae, Filoviridae, Orthomyxoviridae, Bunyaviridae, Arenaviridae, Reoviridae, Birnaviridae, Retroviridae) as well as from the DNA viruses (families of Hepadnaviridae, Circoviridae, Parvoviridae, Papovaviridae, Adenoviridae, Herpesviridae, Poxyiridae, and Iridoviridae) may be utilized. Representative examples include, FeLV, VEE, HFVW, WDSV, SFV, Rabies, ALV, BIV, BLV, EBV, CAEV, SNV, ChTLV, STLV, MPMV, SMRV, RAV, FuSV, MH2, AEV, AMV, CT10, and EIAV.

[0500] In some embodiments, envelope proteins for display on a fusosome include, but are not limited to any of the following sources: Influenza A such as H1N1, H1N2, H3N2 and H5N1 (bird flu), Influenza B, Influenza C virus, Hepatitis A virus, Hepatitis B virus, Hepatitis C virus, Hepatitis D virus, Hepatitis E virus, Rotavirus, any virus of the Norwalk virus group, enteric adenoviruses, parvovirus, Dengue fever virus, Monkey pox, Mononegavirales, Lyssavirus such as rabies virus, Lagos bat virus, Mokola virus, Duvenhage virus, European bat virus 1 & 2 and Australian bat virus, Ephemerovirus, Vesiculovirus, Vesicular Stomatitis Virus (VSV), Herpesviruses such as Herpes simplex virus types 1 and 2, varicella zoster, cytomegalovirus, Epstein-Bar virus (EBV), human herpesviruses (HHV), human herpesvirus type 6 and 8, Human immunodeficiency virus (HIV), papilloma virus, murine gammaherpesvirus, Arenaviruses such as Argentine hemorrhagic fever virus, Bolivian hemorrhagic fever virus, Sabia-associated hemorrhagic fever virus, Venezuelan hemorrhagic fever virus, Lassa fever virus, Machupo virus, Lymphocytic choriomeningitis virus (LCMV), Bunyaviridiae such as Crimean-Congo hemorrhagic fever virus, Hantavirus, hemorrhagic fever with renal syndrome causing virus, Rift Valley fever virus, Filoviridae (filovirus) including Ebola hemorrhagic fever and Marburg hemorrhagic fever, Flaviviridae including Kaysanur Forest disease virus, Omsk hemorrhagic fever virus, Tick-borne encephalitis causing virus and Paramyxoviridae such as Hendra virus and Nipah virus, variola major and variola minor (smallpox), alphaviruses such as Venezuelan equine encephalitis virus, eastern equine encephalitis virus, western equine encephalitis virus, SARS-associated coronavirus (SARS-CoV), West Nile virus, any encephaliltis causing virus.

[0501] In some embodiments, a source cell described herein produces a fusosome, e.g., recombinant retrovirus, e.g., lentivirus, pseudotyped with the VSV-G glycoprotein.

[0502] A fusosome or pseudotyped virus generally has a modification to one or more of its envelope proteins, e.g., an envelope protein is substituted with an envelope protein from another virus. For example, HIV can be pseudotyped with a fusion protein from rhabdovirus, e.g., vesicular stomatitis virus G-protein (VSV-G) envelope proteins, which allows HIV to infect a wider range of cells because HIV envelope proteins (encoded by the env gene) normally target the virus to CD4+ presenting cells. In some embodiments, lentiviral envelope proteins are pseudotyped with VSV-G. In one embodiment, source cells produce recombinant retrovirus, e.g., lentivirus, pseudotyped with the VSV-G envelope glycoprotein.

[0503] Furthermore, a fusogen or viral envelope protein can be modified or engineered to contain polypeptide sequences that allow the transduction vector to target and infect host cells outside its normal range or more specifically limit transduction to a cell or tissue type. For example, the fusogen or envelope protein can be joined in-frame with targeting sequences, such as receptor ligands, antibodies (using an antigen-binding portion of an antibody or a recombinant antibody-type molecule, such as a single chain antibody), and polypeptide moieties or modifications thereof (e.g., where a glycosylation site is present in the targeting sequence) that, when displayed on the transduction vector coat, facilitate directed delivery of the virion particle to a target cell of interest. Furthermore, envelope proteins can further comprise sequences that modulate cell function. Modulating cell function with a transducing vector may increase or decrease transduction efficiency for certain cell types in a mixed population of cells. For example, stem cells could be transduced more specifically with envelope sequences containing ligands or binding partners that bind specifically to stem cells, rather than other cell types that are found in the blood or bone marrow. Non-limiting examples are stem cell factor (SCF) and Flt-3 ligand. Other examples include, e.g., antibodies (e.g., single-chain antibodies that are specific for a cell-type), and essentially any antigen (including receptors) that binds tissues as lung, liver, pancreas, heart, endothelial, smooth, breast, prostate, epithelial, vascular cancer, etc.

[0504] Protein fusogens or viral envelope protein may be re-targeted by mutating amino acid residues in a fusion protein or a targeting protein (e.g. the hemagglutinin protein). In some embodiments the fusogen is randomly mutated. In some embodiments the fusogen is rationally mutated. In some embodiments the fusogen is subjected to directed evolution. In some embodiments the fusogen is truncated and only a subset of the peptide is used in the retroviral vector or VLP. For example, amino acid residues in the measles hemagglutinin protein may be mutated to alter the binding properties of the protein, redirecting fusion (doi:10.1038/nbt942, Molecular Therapy vol. 16 no. 8, 1427-1436 August 2008, doi:10.1038/nbt1060, DOI: 10.1128/JVI.76.7.3558-3563.2002, DOI: 10.1128/JVI.75.17.8016-8020.2001, doi: 10.1073pnas.0604993103).

[0505] In some embodiments, the protein fusogen or viral envelope protein is re-targeted by i) mutating amino acid resides in the natural fusogen protein sequence or viral envelope protein sequence and/or ii) engineering the fusogen protein or viral envelope protein to contain polypeptide sequences that allow the fusogen or viral envelope protein to target and fuse or infect host cells outside its normal range.

[0506] In some embodiments, the fusosomes comprise one or more fusogens on their exterior surface (e.g., integrated into the cell membrane) to target a specific cell or tissue type. Fusogens include without limitation protein based, lipid based, and chemical based fusogens. The fusogen may bind a partner on a target cells' surface. In some embodiments, the fusosome comprising the fusogen will integrate the membrane into a lipid bilayer of a target cell.

[0507] In some embodiments the fusogen is a paramyxovirus fusogen. In some embodiments the fusogen is a Nipah virus protein F, a measles virus F protein, a tupaia paramyxovirus F protein, a paramyxovirus F protein, a Hendra virus F protein, a Henipavirus F protein, a Morbilivirus F protein, a respirovirus F protein, a Sendai virus F protein, a rubulavirus F protein, or an avulavirus F protein.

[0508] In some embodiments, the fusogen is a poxviridae fusogen.

[0509] Additional exemplary fusogens are disclosed in U.S. Pat. No. 9,695,446, US 2004/0028687, U.S. Pat. Nos. 6,416,997, 7,329,807, US 2017/0112773, US 2009/0202622, WO 2006/027202, and US 2004/0009604, the entire contents of all of which are hereby incorporated by reference.

[0510] In some embodiments, a fusogen described herein comprises an amino acid sequence of Table 1, or an amino acid sequence having at least 80%, 85%, 90%, 95%, 96%, 97%, 98%, or 99% sequence identity thereto, or an amino acid sequence having at least 80%, 85%, 90%, 95%, 96%, 97%, 98%, or 99% sequence identity to a portion of the sequence, e.g., a portion of 100, 200, 300, 400, 500, or 600 amino acids in length. For instance, in some embodiments, a fusogen described herein comprises an amino acid sequence having at least 80% identity to any amino acid sequence of Table 1. In some embodiments, a nucleic acid sequence described herein encodes an amino acid sequence of Table 1, or an amino acid sequence having at least 80%, 85%, 90%, 95%, 96%, 97%, 98%, or 99% sequence identity thereto, or an amino acid sequence having at least 80%, 85%, 90%, 95%, 96%, 97%, 98%, or 99% sequence identity to a portion of the sequence, e.g., a portion of 40, 50, 60, 80, 100, 200, 300, 400, 500, or 600 amino acids in length.

[0511] In some embodiments, a fusogen described herein comprises an amino acid sequence set forth in any one of SEQ ID NOS: 1-57, or an amino acid sequence having at least 80%, 85%, 90%, 95%, 96%, 97%, 98%, or 99% sequence identity thereto, or an amino acid sequence having at least 80%, 85%, 90%, 95%, 96%, 97%, 98%, or 99% sequence identity to a portion of the sequence, e.g., a portion of 100, 200, 300, 400, 500, or 600 amino acids in length. For instance, in some embodiments, a fusogen described herein comprises an amino acid sequence having at least 80% identity to an amino acid sequence set forth in any one of SEQ ID NOS: 1-57. In some embodiments, a nucleic acid sequence described herein encodes an amino acid sequence set forth in any one of SEQ ID NOS: 1-57, or an amino acid sequence having at least 80%, 85%, 90%, 95%, 96%, 97%, 98%, or 99% sequence identity thereto, or an amino acid sequence having at least 80%, 85%, 90%, 95%, 96%, 97%, 98%, or 99% sequence identity to a portion of the sequence, e.g., a portion of 40, 50, 60, 80, 100, 200, 300, 400, 500, or 600 amino acids in length.

TABLE 1
Paramyxovirus F sequence clusters. Column 1, Genbank ID includes the
Genbank ID of the whole genome sequence of the virus that is the centroid sequence of the
cluster. Column 2, Nucleotides of CDS provides the nucleotides corresponding to the CDS
of the gene in the whole genome. Column 3, Full Gene Name, provides the full name of the
gene including Genbank ID, virus species, strain, and protein name. Column 4, Sequence,
provides the amino acid sequence of the gene. Column 5, #Sequences/Cluster, provides the
number of sequences that cluster with this centroid sequence.

| Genbank | Nucleotides | Full Gene | | #Sequences/ | SEQ ID |
|---|---|---|---|---|---|
| ID | of CDS | Name | Sequence | Cluster | NO |
| KP317927 | 5630-7399 | gb:KP317927: | MIPQARTELNLGQITMELLIHRSSAIFL | 993 | 1 |
| | | 5630- | TLAINALYLTSSQNITEEFYQSTCSAVS | | |
| | | 7399\| | RGYLSALRTGWYTSVITIELSNIKETK | | |
| | | Organism: | CNGTDTKVKLIKQELDKYKNAVTELQ | | |
| | | Human | LLMQNTPAANNRARREAPQYMNYTI | | |
| | | respiratory | NTTGSLNVSISKKRKRRFLGFLLGVGS | | |
| | | syncytial | AIASGIAVSKVLHLEGEVNKIKNALLS | | |
| | | virus\|Strain | TNKAVVSLSNGVSVLTSKVLDLKNYI | | |
| | | Name:Kilifi_ | NNQLLPIVNQQSCRISNIETVIEFQQKN | | |
| | | 9465_7_ | SRLLEITREFSVNAGVTTPLSTYMLTN | | |
| | | RSVB_2011 | SELLSLINDMPITNDQKKLMSSNVQIV | | |
| | | \|Protein | RQQSYSIMSIIKEEVLAYVVQLPIYGVI | | |
| | | Name: | DTPCWKLHTSPLCTTNIKEGSNICLTR | | |
| | | fusion | TDRGWYCDNAGSVSFFPQADTCKVQ | | |
| | | glycoprotein\| | SNRVFCDTMNSLTLPSEVSLCNTDIFN | | |
| | | Gene | SKYDCKIMTSKTDISSSVITSLGAIVSC | | |
| | | Symbol:F | YGKTKCTASNKNRGIIKTFSNGCDYV | | |
| | | | SNKGVDTVSVGNTLYYVNKLEGKNL | | |
| | | | YVKGEPIINYYDPLVFPSDEFDASISQV | | |
| | | | NEKINQSLAFIRRSDELLHNVNTGKST | | |
| | | | TNIMITAIIIVIIVVLLSLIAIGLLLYCKA | | |
| | | | KNTPVTLSKDQLSGINNIAFSK | | |
| AB524405 | 4556-6217 | gb:AB524405: | MDPKPSTSYLHAFPLIFVAISLVFMAG | 418 | 2 |
| | | 4556- | RASALDGRPLAAAGIVVTGDKAVNIY | | |
| | | 6217\| | TSSQTGTIIIKLLPNMPKDKEQCAKSPL | | |
| | | Organism:New | DAYNRTLTTLLAPLGDSIRRIQESVTT | | |
| | | castle | SGGERQERLVGAIIGGVALGVATAAQ | | |
| | | disease | ITAASALIQANQNAANILKLKESIAAT | | |
| | | virus\|Strain | NEAVHEVTSGLSQLAVAVGKMQQFV | | |
| | | Name: | NDQFNKTAQEIDCIKITQQVGVELNLY | | |
| | | Goose/Alaska/ | LTELTTVFGPQITSPALTQLTIQALYNL | | |
| | | 415/91\| | AGGNMDYMLTKLGVGNNQLSSLISS | | |
| | | Protein | GLISGNPILYDSQTQLLGIQVTLPSVGN | | |
| | | Name: | LNNMRATYLETLSVSTNKGFASALVP | | |
| | | fusion | KVVTQVGSVIEELDTSYCIETDLDLYC | | |
| | | protein\| | TRIVTFPMSPGIFSCLGGNTSACMYSK | | |
| | | Gene | TEGALTTPYMTLKGSVIANCKMTTCR | | |
| | | Symbol:F | CADPPGIISQNYGEAVSLIDKKVCNILT | | |
| | | | LDGITLRLSGEFDATYQKNISIQDSQV | | |
| | | | VITGNLDISTELGNVNNSISNALDKLE | | |
| | | | ESNSKLDKVNVRLTSTSALITYIVLTTI | | |
| | | | ALICGIVSLVLACYIMYKQKAQQKTL | | |
| | | | LWLGNNTLDQMRATTKM | | |
| AF266286 | 4875-7247 | gb:AF266286: | MSIMGLKVNVSAIFMAVLLTLQTPTG | 128 | 3 |
| | | 4875- | QIHWGNLSKIGVVGIGSASYKVMTRS | | |
| | | 7247\| | SHQSLVIKLMPNITLLNNCTRVEIAEY | | |
| | | Organism: | RRLLRTVLEPIRDALNAMTQNIRPVQS | | |
| | | Measles virus | VASSRRHKRFAGVVLAGAALGVATA | | |
| | | strain | AQITAGIALHQSMLNSQAIDNLRASLE | | |
| | | AIK- | TTNQAIEAIRQAGQEMILAVQGVQDY | | |
| | | C\|Strain | INNELIPSMNQLSCDLIGQKLGLKLLR | | |
| | | Name: | YYTEILSLFGPSLRDPISAEISIQALSYA | | |
| | | Measles virus | LGGDINKVLEKLGYSGGDLLGILESRG | | |
| | | strain | IKARITHVDTESYFIVLSIAYPTLSEIKG | | |
| | | Edmonston | VIVHRLEGVSYNIGSQEWYTTVPKYV | | |
| | | (AIK-C | ATQGYLISNFDESSCTFMPEGTVCSQN | | |
| | | vaccine)\| | ALYPMSPLLQECLRGYTKSCARTLVS | | |
| | | Protein | GSFGNRFILSQGNLIANCASILCKCYTT | | |
| | | Name: | GTIINQDPDKILTYIAADNCPVVEVNG | | |
| | | fusion | VTIQVGSRRYPDAVYLHRIDLGPPILL | | |
| | | protein\| | ERLDVGTNLGNAIAKLEDAKELLESS | | |
| | | Gene | DQILRSMKGLSSTCIVYILIAVCLGGLI | | |
| | | Symbol:F | GIPALICCCRGRCNKKGEQVGMSRPG | | |
| | | | LKPDLTGTSKSYVRSL | | |
| AB503857 | 3068-4687 | gb:AB503857: | MSWKVVIIFSLLITPQHGLKESYLEES | 125 | 4 |
| | | 3068- | CSTITEGYLSVLRTGWYTNVFTLEVG | | |
| | | 4687\| | DVENLTCSDGPSLIKTELDLTKSALRE | | |
| | | Organism: | LKTVSADQLAREEQIEKPRQSRFVLG | | |
| | | Human | AIALGVATAAAVTAGVAIAKTIRLESE | | |
| | | metapneu | VTAIKNALKTTNEAVSTLGNGVRVLA | | |
| | | movirus\| | TAVRELKDFVSKNLTRAINKNKCDID | | |
| | | Strain | DLKMAVSFSQFNRRFLNVVRQFSDNA | | |
| | | Name:Jpn | GITPAISLDLMTDAELARAVSNMPTSA | | |
| | | 03-1\| | GQIKLMLENRAMVRRKGFGILIGVYG | | |
| | | Protein | SSVIYMVQLPIFGVIDTPCWIVKAAPS | | |
| | | Name: | CSEKKGNYACLLREDQGWYCQNAGS | | |
| | | fusion | TVYYPNEKDCETRGDHVFCDTAAGIN | | |
| | | glycoprotein | VAEQSKECNINISTTNYPCKVSTGRHP | | |
| | | precursor\| | ISMVALSPLGALVACYKGVSCSIGSNR | | |
| | | Gene | VGIIKQLNKGCSYITNQDADTVTIDNT | | |
| | | Symbol:F | VYQLSKVEGEQHVIKGRPVSSSFDPIK | | |
| | | | FPEDQFNVALDQVFENIENSQALVDQ | | |
| | | | SNRILSSAEKGNTGFIIVIILIAVLGSSM | | |
| | | | ILVSIFIIIKKTKKPTGAPPELSGVTNNG | | |
| | | | FIPHS | | |
| EU277658 | 5078-6700 | gb:EU277658: | MIIIVITMILSLTPSSLCQIDITKLQSVG | 93 | 5 |
| | | 5078- | VLVNSPKGIKISQNFETRYLILSLIPKIE | | |
| | | 6700\| | DSHSCGNQQIDQYKKLLDRLIIPLYDG | | |
| | | Organism: | LKLQKDVIVVNHESHNNTNLRTKRFF | | |
| | | Bovine | GEIIGTIAIGIATSAQITAAVALVEAKQ | | |
| | | parainfluenza | ARSDIDKLKEAIKDTNKAVQSIQSSVG | | |
| | | virus | NLIVAVKSVQDYVNNEIVPSITRLGCE | | |
| | | 3\|Strain | AAGLQLGIALTQHYSELTNIFGDNIGT | | |
| | | Name: | LGEKGVKLQGIASLYRTNITEVFTTST | | |
| | | Q5592\|Protein | VDQYDIYDLLFTESIKMRVIDVDLSDY | | |
| | | Name: | SITLQVRLPLLTKVSNTQIYKVDSISYN | | |
| | | fusion | IQGKEWYIPLPHHIMTKGAFLGGADIK | | |
| | | protein\| | ECIESFSNYICPSDPGFILNHEMENCLS | | |
| | | Gene | GNITQCPKTIVTSDIVPRYAFVDGGVI | | |
| | | Symbol:F | ANCIPTTCTCNGIDNRINQSPDQGIKIIT | | |
| | | | YKECQIVGINGMLFKTNQEGTLAKYT | | |
| | | | FDNIKLNNSVALNPIDISLELNKAKSD | | |
| | | | LEESKRWIEKSNQKLDSIGSWHQSSVT | | |
| | | | IIIIIVMIVVLLIINAIIIMIMIRYLRDRNR | | |
| | | | HLNNKDSEPYVLTNRQ | | |
| AB040874 | 4546-6162 | gb:AB040874: | MKVFLVTCLGFAVFSSSVCVNINILQQ | 89 | 6 |
| | | 4546- | IGYIKQQVRQLSYYSQSSSSYIVVKLL | | |
| | | 6162\| | PNIQPTDNSCEFKSVTQYNKTLSNLLL | | |
| | | Organism: | PIAENINNIASPSSGSRRHKRFAGIAIGI | | |
| | | Mumps | AALGVATAAQVTAAVSLVQAQTNAR | | |
| | | virus\| | AIAAMKNSIQATNRAVFEVKEGTQRL | | |
| | | Strain | AIAVQAIQDHINTIMNTQLNNMSCQIL | | |
| | | Name: | DNQLATSLGLYLTELTTVFQPQLINPA | | |
| | | Miyahara\| | LSPISIQALRSLLGSMTPAVVQATLSTS | | |
| | | Protein | ISAAEILSAGLMEGQIVSVLLDEMQMI | | |
| | | Name: | VKINIPTIVTQSNALVIDFYSISSFINNQ | | |
| | | ofusin | ESIIQLPDRILEIGNEQWSYPAKNCKLT | | |
| | | protein\| | RHHIFCQYNEAERLSLESKLCLAGNIS | | |
| | | Gene | ACVFSPIAGSYMRRFVALDGTIVANC | | |
| | | Symbol:F | RSLTCLCKSPSYPIYQPDHHAVTTIDL | | |
| | | | TACQTLSLDGLDFSIVSLSNITYAENLT | | |
| | | | ISLSQTINTQPIDISTELSKVNASLQNA | | |
| | | | VKYIKESNHQLQSVNVNSKIGAIIVAA | | |
| | | | LVLSILSIIISLLFCCWAYVATKEIRRIN | | |
| | | | FKTNHINTISSSVDDLIRY | | |
| AB475097 | 4908-6923 | gb:AB475097: | MNPHEQTIPMHEKIPKRSKTQTHTQQ | 46 | 7 |
| | | 4908- | DLPQQHSTKSAESKTSRARHSITSAQR | | |
| | | 6923\| | STHYDPRTADWPDYYIMKRTRSCKQ | | |
| | | Organism: | ASYRSDNIPAHGDHDGIIHHTPESVSQ | | |
| | | Canine | GAKSRLKMGQSNAVKSGSQCTWLVL | | |
| | | distemper | WCIGVASLFLCSKAQIHWNNLSTIGII | | |
| | | virus\| | GTDSVHYKIMTRPSHQYLVIKLMPNV | | |
| | | Strain | SLIDNCTKAELDEYEKLLSSILEPINQA | | |
| | | Name: M25CR\| | LTLMTKNVKPLQSVGSGRRQRRFAG | | |
| | | Protein | VVLAGAALGVATAAQITAGIALHQSN | | |
| | | Name: | LNAQAIQSLRTSLEQSNKAIEEIREATQ | | |
| | | ofusin | ETVIAVQGVQDYVNNELVPAMQHMS | | |
| | | protein\| | CELVGQRLGLKLLRYYTELLSIFGPSL | | |
| | | Gene | RDPISAEISIQALSYALGGEIHKILEKL | | |
| | | Symbol:F | GYSGNDMIAILESRGIKTKITHVDLPG | | |
| | | | KFIILSVSYPTLSEVKGVIVHRLEAVSY | | |
| | | | NIGSQEWYTTVPRYVATNGYLISNFD | | |
| | | | ESSCVFVSESAICSQNSLYPMSPLLQQ | | |
| | | | CIRGDTSSCARTLVSGTMGNKFILSKG | | |
| | | | NIVANCASILCKCYSTSTIINQSPDKLL | | |
| | | | TFIASDTCPLVEIDGVTIQVGSRQYPD | | |
| | | | MVYESKVALGPAISLERLDVGTNLGN | | |
| | | | ALKKLDDAKVLIDSSNQILETVRRSSF | | |
| | | | NFGSLLSVPILSCTALALLLLICCCKRR | | |
| | | | YQQTHKQNTKVDPTFKPDLTGTSRSY | | |
| | | | VRSL | | |
| AJ849636 | 5526-7166 | gb:AJ849636: | MTRVAILTFLFLFPNAVACQIHWGNL | 34 | 8 |
| | | 5526- | SKIGIVGTGSASYKVMTRPSHQTLVIK | | |
| | | 7166\|Organism: | LMPNITAIDNCTKSEIAEYKRLLITVLK | | |
| | | Peste | PVEDALSVITKNVRPIQTLTPGRRTRR | | |
| | | -des- | FAGAVLAGVALGVATAAQITAGVAL | | |
| | | petits- | HQSLMNSQAIESLKTSLEKSNQAIEEIR | | |
| | | ruminants | LANKETILAVQGVQDYINNELVPSVH | | |
| | | virus\| | RMSCELVGHKLGLKLLRYYTEILSIFG | | |
| | | Strain | PSLRDPIAAEISIQALSYALGGDINRIL | | |
| | | Name: | DKLGYSGGDFLAILESKGIKARVTYV | | |
| | | Turkey | DTRDYFIILSIAYPTLSEIKGVIVHKIEA | | |
| | | 2000\| | ITYNIGAQEWYTTIPKYVATQGYLISN | | |
| | | Protein | FDETSCVFTPDGTVCSQNALYPMSPLL | | |
| | | Name: | QECFQGSTKSCARTLVSGTISNRFILSK | | |
| | | fusion | GNLIANCASVLCKCYTTETVISQDPDK | | |
| | | protein\| | LLTVVASDKCPVVEVDGVTIQVGSRE | | |
| | | Gene | YPDSVYLHKIDLGPAISLEKLDVGTNL | | |
| | | Symbol:F | GNAVTRLENAKELLDASDQILKTVKG | | |
| | | | VPFGGNMYIALAACIGVSLGLVTLICC | | |
| | | | CKGRCKNKEVPISKINPGLKPDLTGTS | | |
| | | | KSYVRSL | | |
| AF017149 | 6618-8258 | gb:AF017 | MATQEVRLKCLLCGIIVLVLSLEGLGI | 29 | 9 |
| | | 149\| | LHYEKLSKIGLVKGITRKYKIKSNPLT | | |
| | | Organism: | KDIVIKMIPNVSNVSKCTGTVMENYK | | |
| | | Hendra | SRLTGILSPIKGAIELYNNNTHDLVGD | | |
| | | virus\| | VKLAGVVMAGIAIGIATAAQITAGVA | | |
| | | Strain | LYEAMKNADNINKLKSSIESTNEAVV | | |
| | | Name:UN | KLQETAEKTVYVLTALQDYINTNLVP | | |
| | | KNOWN- | TIDQISCKQTELALDLALSKYLSDLLF | | |
| | | AF017149 | VFGPNLQDPVSNSMTIQAISQAFGGN | | |
| | | \|Protein | YETLLRTLGYATEDFDDLLESDSIAGQ | | |
| | | Name: | IVYVDLSSYYIIVRVYFPILTEIQQAYV | | |
| | | fusion\|Gene | QELLPVSFNNDNSEWISIVPNFVLIRNT | | |
| | | Symbol:F | LISNIEVKYCLITKKSVICNQDYATPM | | |
| | | | TASVRECLTGSTDKCPRELVVSSHVPR | | |
| | | | FALSGGVLFANCISVTCQCQTTGRAIS | | |
| | | | QSGEQTLLMIDNTTCTTVVLGNIIISLG | | |
| | | | KYLGSINYNSESIAVGPPVYTDKVDIS | | |
| | | | SQISSMNQSLQQSKDYIKEAQKILDTV | | |
| | | | NPSLISMLSMIILYVLSIAALCIGLITFIS | | |
| | | | FVIVEKKRGNYSRLDDRQVRPVSNGD | | |
| | | | LYYIGT | | |
| AB005795 | 4866-6563 | gb:AB005795: | MATYIQRVQCISALLSVVLTTLVSCQI | 23 | 10 |
| | | 4866- | PRDRLSNIGVIVDEGKSLKIAGSHESR | | |
| | | 6563\| | YIVLSLVPGIDLENGCGTAQVIQYKSL | | |
| | | Organism: | LNRLLIPLRDALDLQEALITVTNDTMT | | |
| | | Sendai | GADVPQSRFFGAVIGTIALGVATSAQI | | |
| | | virus\| | TAGIALAEAREAKRDIALIKESMTKTH | | |
| | | Strain | KSIELLQNAVGEQILALKTLQDFVNDE | | |
| | | Name: | IKPAISELGCETAALRLGIKLTQHYSEL | | |
| | | Ohita\|Protein | LTAFGSNFGTIGEKSLTLQALSSLYSA | | |
| | | Name: | NITEIMTTIRTGQSNIYDVIYTEQIKGT | | |
| | | fusion | VIDVDLERYMVTLSVKIPILSEVPGVLI | | |
| | | protein\| | HKASSISYNIDGEEWYVTVPSHILSRA | | |
| | | Gene | SFLGGANIADCVESRLTYICPRDPAQLI | | |
| | | Symbol:F | PDSQQKCILGDTTRCPVTKVVDNIIPK | | |
| | | | FAFVNGGVVANCIASTCTCGTGRRPIS | | |
| | | | QDRSKGVVFLTHDNCGLIGVNGIELY | | |
| | | | ANRKGHDATWGVQNLTVGPAIAIRPV | | |
| | | | DISLNLAAATDFLQDSRAELEKARKIL | | |
| | | | SEVGRWYNSGATLITIIVVMIVVLVVII | | |
| | | | VIVIVLYRLRRSMLMSNPAGRISRDTY | | |
| | | | TLEPKIRHMYTNGGFDAMTEKR | | |
| AF457102 | 5088-6755 | gb:AF457 | MQKSEILFLVYSSLLLSSSLCQIPVEKL | 21 | 11 |
| | | 102\| | SNVGVIINEGKLLKIAGSYESRYIVLSL | | |
| | | Organism: | VPSIDLQDGCGTTQIIQYKNLLNRLLIP | | |
| | | Human | LKDALDLQESLITITNDTTVTNDNPQT | | |
| | | parainfluenza | RFFGAVIGTIALGVATAAQITAGIALA | | |
| | | virus | EAREARKDIALIKDSIVKTHNSVELIQ | | |
| | | 1 strain | RGIGEQIIALKTLQDFVNDEIRPAIGEL | | |
| | | Washington/ | RCETTALKLGIKLTQHYSELATAFSSN | | |
| | | 1964\| | LGTIGEKSLTLQALSSLYSANITEILST | | |
| | | Stramin | TKKDKSDIYDIIYTEQVKGTVIDVDLE | | |
| | | Name: | KYMVTLLVKIPILSEIPGVLIYRASSISY | | |
| | | Washington | NIEGEEWHVAIPNYIINKASSLGGADV | | |
| | | 1964\|Protein | TNCIESKLAYICPRDPTQLIPDNQQKCI | | |
| | | Name:F | LGDVSKCPVTKVINNLVPKFAFINGG | | |
| | | glycoprotein | VVANCIASTCTCGTNRIPVNQDRSRG | | |
| | | \|IGene | VTFLTYTNCGLIGINGIELYANKRGRD | | |
| | | Symbol:F | TTWGNQIIKVGPAVSIRPVDISLNLAS | | |
| | | | ATNFLEESKTELMKARAIISAVGGWH | | |
| | | | NTESTQIIMIIIVCILIIIICGILYYLYRVR | | |
| | | | RLLVMINSTHNSPVNAYTLESRMRNP | | |
| | | | YMGNNSN | | |
| AB910309 | 4951-6582 | gb:AB910309: | MGKIRVIIISSLLLSNITTAQVGWDNLT | 12 | 12 |
| | | 4951- | SIGVISTKQYDYKITTLNTNQLMVIKM | | |
| | | 6582\| | VPNISSIINCTKPELMKYRELVLGVIRP | | |
| | | Organism: | INESLELMNSYINMRAGSERFIGAVIA | | |
| | | Feline | GVALGVATAAQITSGIALHNSIMNKR | | |
| | | morbillivirus | QIQELRKALSTTNKAIDEIRIAGERTLI | | |
| | | \|Strain | AVQGVQDYINNIIIPMQDKLQCDILSS | | |
| | | Name: SS1 | QLAIALLRYYTNILTVFGPSIRDPVTSII | | |
| | | \|Protein | SIQALSQAFNGNLQALLDGLGYTGRD | | |
| | | Name: | LRDLLESRSITGQIIHADMTDLFLVLRI | | |
| | | fusion | NYPSITEMQGVTIYELNSITYHIGPEE | | |
| | | protein\| | WYTIMPNFIAVQGFLTSNFDERKCSIT | | |
| | | Gene | KSSILCQQNSIYPMSTEMQRCIKGEIRF | | |
| | | Symbol:F | CPRSKAVGTLVNRFILTKGNLMANCL | | |
| | | | GVICRCYSSGQIITQDPSKLITIISQEEC | | |
| | | | KEVGVDGIRIMVGPRKLPDVIFNARLE | | |
| | | | VGVPISLSKLDVGTDLAIASAKLNNSK | | |
| | | | ALLEQSDKILDSMSKLDSINSRITGLIL | | |
| | | | AIMAIFIITVTIIWIIYKRCRNKDNKFST | | |
| | | | SIEPLYIPPSYNSPHSVVKSI | | |
| KT071755 | 4310-6070 | gb:KT071755: | MIAALFISLFATCGALDNSVLAPVGIA | 12 | 13 |
| | | 4310- | SAQEWQLAAYTNTLSGTIAVRFVPVL | | |
| | | 6070\| | PGNLSTCAQATLAEYNKTVTNILGPL | | |
| | | Orga nism: | KENLETLLSEPTKTAARFVGAIIGTVA | | |
| | | Avian | LGVATSAQITAAVALNQAQENARNIW | | |
| | | paramyxo | RLKESIRKTNEAVLELKDGLASTAIAL | | |
| | | virus | DKVQKFINEDIIPQIKEIDCQVVANKL | | |
| | | 2\|Strain | GVYLSLYLTELTTIFGAQITNPALTPLS | | |
| | | Name:AP | YQALYNLCGGDMGKLTELIGVKAKDI | | |
| | | MV- | NSLYEANLITGQVIGYDSESQIILIQVS | | |
| | | 2/ | YPSVSEVTGVRATELVTVSVTTPKGE | | |
| | | Procarduelis | GRAIAPKYVAQSRVVTEELDTSTCRFS | | |
| | | nipalensis/ | KTTLYCRSIITRPLPPLIANCLNGLYQD | | |
| | | China/Suiling/ | CQYTTEIGALSSRFITVNGGIIANCRAT | | |
| | | 53/2013 | ICKCVNPPKIIVQSDASSLTVIDSAICK | | |
| | | \|Protein | DVVLDNVQLRLEGKLSAQYFTNITIDL | | |
| | | Name: | SQITTSGSLDISSEIGSINNTVNKVEELI | | |
| | | fusion | AESNAWLQAVNPHLVNNTSIIVLCVL | | |
| | | protein\| | AAIFVVWLVALTGCLAYYIKKSSATR | | |
| | | Gene | MVGIGSSPAGNPYVAQSATKM | | |
| | | Symbol:F | | | |
| AY029299 | 4598-6265 | gb:AY029 | MGARLGPLAMAPGRYVIIFNLILLHRV | 11 | 14 |
| | | 299\| | VSLDNSRLLQQGIMSATEREIKVYTNS | | |
| | | Organism:Avian | ITGSIAVRLIPNLPQEVLKCSAGQIKSY | | |
| | | paramyxo | NDTLNRIFTPIKANLERLLATPSMLED | | |
| | | virus | NQNPAPEPRLIGAIIGTAALGLATAAQ | | |
| | | 6\|Strain | VTAALALNQAQDNAKAILNLKESITK | | |
| | | Name:AP | TNEAVLELKDATGQIAIALDKTQRFIN | | |
| | | MV- | DNILPAINNLTCEVAGAKVGVELSLYL | | |
| | | 6/duck/ | TELSTVFGSQITNPALSTLSIQALMSLC | | |
| | | Taiwan/Y1/98 | GNDFNYLLNLMGAKHSDLGALYEAN | | |
| | | \|Protein | LINGRIIQYDQASQIMVIQVSVPSISSIS | | |
| | | Name: | GLRLTELFTLSIETPVGEGKAVVPQFV | | |
| | | fusion | VESGQLLEEIDTQACTLTDTTAYCTIV | | |
| | | protein\| | RTKPLPELVAQCLRGDESRCQYTTGIG | | |
| | | Gene | MLESRFGVFDGLVIANCKATICRCLAP | | |
| | | Symbol:F | EMIITQNKGLPLTVISQETCKRILIDGV | | |
| | | | TLQIEAQVSGSYSRNITVGNSQIAPSGP | | |
| | | | LDISSELGKVNQSLSNVEDLIDQSNQL | | |
| | | | LNRVNPNIVNNTAIIVTIVLLVLLVLW | | |
| | | | CLALTISILYVSKHAVRMIKTVPNPYV | | |
| | | | MQAKSPGSATQF | | |
| AY141760 | 5028-6665 | gb:AY141 | MTRITILQIILTLTLPVMCQVSFDNLEQ | 8 | 15 |
| | | 760\| | VGVMFDKPKFLKITGPASTATMIIKLIP | | |
| | | Organism:Fer- | TLGTMESCGTSAVNEYKKTLDTILVP | | |
| | | de-Lance | LRDTINKLSTDITVVEGTSNISNKREK | | |
| | | paramyxo | RFVGIAIAVGAVALATSAQITAGIALS | | |
| | | virus\| | NTIKNAEAIESIKSSIQASNQAIQKVID | | |
| | | Strain | AQGRTVTVINGIQDHINSVINPALNQL | | |
| | | Name:AT | GCDVAKNTLAISLTQYFSKLSLLFGPN | | |
| | | CC VR- | LRNPVEQPLSVQAIAGLMDGDINAVV | | |
| | | 895\| | SQLGYTQSDLLDLLSTESIVGTVTAID | | |
| | | Protein | MVNYMIQIEMSFPQYITIPDTKVLEGH | | |
| | | Name: | KITFNDKGSEWQTQVPSTIAVRDILIA | | |
| | | fusion protein | GVDPDGCSITSTSYICKNDPTYAMSEV | | |
| | | F\|Gene | LTNCFRGNTQECPRARITSTFATRFAI | | |
| | | Symbol:F | ARSTVIANCVAAVCLCGDPGIPVVQK | | |
| | | | AEVTLTAMTLDQCSLITVDGLQIKPSK | | |
| | | | SIANVTANFGNITLGPVVSVGDLDLSA | | |
| | | | ELTKVQSDLKEAQDKLDESNAILQGI | | |
| | | | NNKILTAPTSIALIVVSVVVILLIIGMIS | | |
| | | | WLVWLTKAVRRSNTRSERVTPSAYN | | |
| | | | NLGFIK | | |
| EU877976 | 4330-6410 | gb:EU877976: | MRLSRTILTLILGTLTGYLMGAHSTNV | 8 | 16 |
| | | 4330- | NEGPKSEGIRGDLIPGAGIFVTQVRQL | | |
| | | 6410\| | QIYQQSGYHDLVIRLLPLLPAELNDCQ | | |
| | | Organism: | REVVTEYNNTVSQLLQPIKTNLDTLL | | |
| | | Avian | ADGGTRDADIQPRFIGAIIATGALAVA | | |
| | | paramyxo | TVAEVTAAQALSQSKTNAQNILKLRD | | |
| | | virus | SIQATNQAVFEISQGLEATATVLSKLQ | | |
| | | 4\|Strain | TELNENIIPSLNNLSCAAMGNRLGVSL | | |
| | | Name:AP | SLYLTLMTTLFGDQITNPVLTPISYSTL | | |
| | | MV- | SAMAGGHIGPVMSKILAGSVTSQLGA | | |
| | | 4/KR/YJ/06 | EQLIASGLIQSQVVGYDSQYQLLVIRV | | |
| | | \|Protein | NLVRIQEVQNTRVVSLRTLAVNRDGG | | |
| | | Name: | LYRAQVPPEVVERSGIAERFYADDCV | | |
| | | ofusin | LTTTDYICSSIRSSRLNPELVKCLSGAL | | |
| | | protein\| | DSCTFERESALLSTPFFVYNKAVVAN | | |
| | | Gene | CKAATCRCNKPSIIAQYSASALVTITT | | |
| | | Symbol:F | DTCADLEIEGYRFNIQTESNSWVAPNF | | |
| | | | TVSTSQIVSVDPIDISSDIAKINSSIEAA | | |
| | | | REQLELSNQILSRINPRIVNDESLIAIIV | | |
| | | | TIVVLSLLVIGLIVVLGVMYKNLKKV | | |
| | | | QRAQAAMMMQQMSSSQPVTTKLGTP | | |
| | | | F | | |
| AB176531 | 4793-6448 | gb:AB176531: | MHHLHPMIVCIFVMYTGIVGSDAIAG | 7 | 17 |
| | | 4793- | DQLLNIGVIQSKIRSLMYYTDGGASFI | | |
| | | 6448\| | VVKLLPNLPPSNGTCNITSLDAYNVTL | | |
| | | Organism: | FKLLTPLIENLSKISTVTDTKTRQKRFA | | |
| | | Human | GVVVGLAALGVATAAQITAAVAIVK | | |
| | | parainfluenza | ANANAAAINNLASSIQSTNKAVSDVID | | |
| | | virus | ASRTIATAVQAIQDRINGAIVNGITSAS | | |
| | | 2\|Strain | CRAHDALIGSILNLYLTELTTIFHNQIT | | |
| | | Name:Nishio | NPALTPLSIQALRILLGSTLPIVIESKLN | | |
| | | \|Protein | TNFNTAELLSSGLLTGQIISISPMYMQ | | |
| | | Name: | MLIQINVPTFIMQPGAKVIDLIAISANH | | |
| | | fusion | KLQEVVVQVPNRILEYANELQNYPAN | | |
| | | protein\| | DCVVTPNSVFCRYNEGSPIPESQYQCL | | |
| | | Gene | RGNLNSCTFTPIIGNFLKRFAFANGVL | | |
| | | Symbol:F | YANCKSLLCRCADPPHVVSQDDTQGI | | |
| | | | SIIDIKRCSEMMLDTFSFRITSTFNATY | | |
| | | | VTDFSMINANIVHLSPLDLSNQINSINK | | |
| | | | SLKSAEDWIADSNFFANQARTAKTLY | | |
| | | | SLSAIALILSVITLVVVGLLIAYIIKLVS | | |
| | | | QIHQFRSLAATTMFHRENPAFFSKNN | | |
| | | | HGNIYGIS | | |
| BK005918 | 4677-6302 | gb:BK005918 | MPQQQVAHTCVMLWGIISTVSGINTE | 7 | 18 |
| | | \|Organism: | ALSQYGVVVTNVRQLTYYTQAGSTY | | |
| | | Porcine | LAVRLLPSLASPDQSCALHSIINYNAT | | |
| | | rubulavirus | LQAILSPIAENLNLISTALREQHRKKRF | | |
| | | \|Strain | AGVAIGLTALGVATAAQATAAVALV | | |
| | | Name:UN | RANKNAEKVEQLSQALGETNAAISDL | | |
| | | KNOWN- | IDATKNLGFAVQAIQNQINTAILPQIH | | |
| | | BK005918\| | NLSCQVIDAQLGNILSLYLTELTTVFQ | | |
| | | Protein | PQLTNPALSPLTIQALRAVLGTTLPAL | | |
| | | Name: | LSEKLKSNIPLGDLMSSGLLKGQLVGL | | |
| | | fusion | NLQNMLMIIELYIPTLSTHSTAKVLDL | | |
| | | protein\| | VTISSHVNGREVEIQVPNRVLELGSEV | | |
| | | Gene | LGYGGSECALTMSHILCPFNDARVLS | | |
| | | Symbol:F | TDMKYCLQGNITHCIFSPVVGSFLRRF | | |
| | | | ALVNGVVIANCADMSCVCFDPQEIIY | | |
| | | | QNFQEPTTVIDIKKCGKVQLDTLTFTIS | | |
| | | | TFANRTYGPPAYVPPDNIIQSEPLDISG | | |
| | | | NLIAVNNSLSSALNHLATSEILRNEQI | | |
| | | | WTSSLGISTIVALVIIGILIICLVVTWAA | | |
| | | | LWALLKEVRGLNSAVNSQLSSYVMG | | |
| | | | DKFIRY | | |
| KC237063 | 4530-6185 | gb:KC237063: | MGTRIQFLMVSCLLAGTGSLDPAALM | 7 | 19 |
| | | 4530- | QIGVIPTNVRQLMYYTEASSAFIVVKL | | |
| | | 6185\| | MPTIDSPISGCNITSISSYNATMTKLLQ | | |
| | | Organism: | PIGENLETIRYQLIPTRRRRRFVGVVIG | | |
| | | Parainfluenza | LAALGVATAAQVTAAVALVKANKN | | |
| | | virus | AAAILNLKNAIQKTNAAVADVVQAT | | |
| | | 5\|Strain | QSLGTAVQAVQDHINSVVSPAITAAN | | |
| | | Name:08- | CKAQDAIIGSILNLYLTELTTIFHNQIT | | |
| | | 1990\| | NPALSPITIQALRILLGSTLPTVVRKSF | | |
| | | Protein | NTQISAAELLSSGLLTGQIVGLDLTYM | | |
| | | Name: | QMVIKIELPTLTVQPATQIIDLVTISAFI | | |
| | | fusion | NNREVMAQLPTRIIVTGSLIQAYPASQ | | |
| | | protein\| | CTITPNTVYCRYNDAQVLSDDTMACL | | |
| | | Gene | QGNLTRCTFSPVVGSFLTRFVLFDGIV | | |
| | | Symbol:F\| | YANCRSMLCKCMQPAAVILQPSSSPV | | |
| | | Segment: | TVIDMHKCVSLQLDNLRFTITQLANIT | | |
| | | 4 | YNSTIKLETSQILPIDPLDISQNLAAVN | | |
| | | | KSLSDALQHLAQSDTYLSAITSATTTS | | |
| | | | VLSIIAICLGSLGLILIILISVVVWKLLTI | | |
| | | | VAANRNRMENFVYHNSAFHHSRSDL | | |
| | | | SEKNQPATLGTR | | |
| AY729016 | 5862-7523 | gb:AY729016: | MIPGRIFLVLLVIFNTKPIHPNTLTEKF | 6 | 20 |
| | | 5862- | YESTCSVETAGYKSALRTGWHMTVM | | |
| | | 7523\| | SIKLSQINIESCKSSNSLLAHELAIYSSA | | |
| | | Organism: | VDELRTLSSNALKSKRKKRFLGLILGL | | |
| | | Murine | GAAVTAGVALAKTVQLESEIALIRDA | | |
| | | pneumonia | VRNTNEAVVSLTNGMSVLAKVVDDL | | |
| | | virus\| | KNFISKELLPKINRVSCDVHDITAVIRF | | |
| | | Strain | QQLNKRLLEVSREFSSNAGLTHTVSSF | | |
| | | Name:15; | MLTDRELTSIVGGMAVSAGQKEIMLS | | |
| | | ATCC | SKAIMRRNGLAILSSVNADTLVYVIQL | | |
| | | VR- | PLFGVMDTDCWVIRSSIDCHNIADKY | | |
| | | 25\|Protein | ACLARADNGWYCHNAGSLSYFPSPT | | |
| | | Name: | DCEIHNGYAFCDTLKSLTVPVTSRECN | | |
| | | fusion | SNMYTTNYDCKISTSKTYVSTAVLTT | | |
| | | glycoprotein | MGCLVSCYGHNSCTVINNDKGIIRTLP | | |
| | | precursor 1 | DGCHYISNKGVDRVQVGNTVYYLSK | | |
| | | Gene | EVGKSIVVRGEPLVLKYDPLSFPDDKF | | |
| | | Symbol:F | DVAIRDVEHSINQTRTFLKASDQLLDL | | |
| | | | SENRENKNLNKSYILTTLLFVVMLIIIM | | |
| | | | AVIGFILYKVLKMIRDNKLKSKSTPGL | | |
| | | | TVLS | | |
| AB543336 | 5174-6805 | gb:AB543336: | MGVKGLSLIMIGLLISPITNLDITHLMN | 5 | 21 |
| | | 5174- | LGTVPTAIRSLVYYTYTKPSYLTVDLI | | |
| | | 6805\| | PNLKNLDQNCNYSSLNYYNKTALSLI | | |
| | | Organism: | QPIADNINRLTKPITSSEIQSRFFGAVIG | | |
| | | Human | TIALGVATAAQVTAAIGLAKAQENAK | | |
| | | parainfluenza | LILTLKKAATETNEAVRDLANSNKIV | | |
| | | virus | VKMISAIQNQINTIIQPAIDQINCQIKDL | | |
| | | 4a\|Strain | QVANILNLYLTEITTVFHNQLTNPALE | | |
| | | Name: M- | SISIQALKSLLGPTLPEVLSKLDLNNIS | | |
| | | 25\|Protein | AASVMASGLIKGQIIAVDIPTMTLVLM | | |
| | | Name: | VQIPSISPLRQAKIIDLTSITIHTNSQEV | | |
| | | fusion | QAVVPARFLEIGSEILGFDGSVCQITK | | |
| | | protein\| | DTIFCPYNDAYELPIQQKRCLQGQTRD | | |
| | | Gene | CVFTPVAGTFPRRFLTTYGTIVANCRD | | |
| | | Symbol:F | LVCSCLRPPQIIYQPDENPVTIIDKDLC | | |
| | | | TTLTLDSITIEIQKSINSTFRREVVLEST | | |
| | | | QVRSLTPLDLSTDLNQYNQLLKSAED | | |
| | | | HIQRSTDYLNSINPSIVNNNAIIILIILCI | | |
| | | | LLILTVTICIIWLKYLTKEVKNVARNQ | | |
| | | | RLNRDADLFYKIPSQIPVPR | | |
| AF298895 | 4834-6450 | gb:AF298895\| | MRIALTAVIVSIHFDLAFPMNKNSLLS | 5 | 22 |
| | | Organism: | VGLVHKSVKNLYFYSQGSPSYIVVKL | | |
| | | Tioman | VPTLGNVPGNCTLNSLVRYKSTVSSL | | |
| | | virus\| | LSPLAENLEYLQKTLTVSRGGRRRRF | | |
| | | Strain | AGVAIGLAALGVAAAAQATAAVALV | | |
| | | Name:UN | EARQNAAQIQSLSEAIQNTNLAVNEL | | |
| | | KNOWN- | KTAIGASATAIQAIQTQINEVINPAINR | | |
| | | AF298895 | LSCEILDAQLASMLNLYLIHLTTVFQN | | |
| | | \|Protein | QLTNPALTPLSIQSLQSLLQGTSSVLTN | | |
| | | Name: | ITSSSKLALNDALVTGLITGQVVGLN | | |
| | | fusion | MTSLQIVIAAYVPSVAKLSNAVVHNFI | | |
| | | protein\| | RITTSVNGTEVIIQSPTIIMEQNEVMYD | | |
| | | Gene | LKTGHCTESDLNIYCPYVDAQLLSPG | | |
| | | Symbol:F | MTNCINGRLNDCTFSKVVGSFPTRFA | | |
| | | | AVEGAILANCKYLQCNCLTPPYIITPL | | |
| | | | NGEMISMIDLSKCQRLDLGTIVFDINN | | |
| | | | PVNVTFNGNYRADVGQMIVTNPLDIS | | |
| | | | AELNQINTSLSNAQGFLSKSDAWLHV | | |
| | | | SQWVTNSGTIFIILIIGLIVGIVYMIINT | | |
| | | | YVVVQIIKEINRMRTSDRAHLLKGSIS | | |
| | | | SIST | | |
| FJ215863 | 4499-6130 | gb:FJ215863: | MGQISVYLINSVLLLLVYPVNSIDNTLI | 5 | 23 |
| | | 4499- | APIGVASANEWQLAAYTTSLSGTIAV | | |
| | | 6130\| | RFLPVLPDNMTTCLRETITTYNNTVN | | |
| | | Organism: | NILGPLKSNLDALLSSETYPQTRLIGA | | |
| | | nAvia | VIGSIALGVATSAQITAAVALKQAQD | | |
| | | paramyxo | NARNILALKEALSKTNEAVKELSSGL | | |
| | | virus | QQTAIALGKIQSFVNEEILPSINQLSCE | | |
| | | 8\|Strain | VTANKLGVYLSLYLTELTTIFGAQLTN | | |
| | | Name:goose/ | PALTSLSYQALYNLCGGNMAMLTQKI | | |
| | | Delaware/ | GIKQQDVNSLYEAGLITGQVIGYDSQ | | |
| | | 1053/76 | YQLLVIQVNYPSISEVTGVRATELVTV | | |
| | | \|Protein | SVTTDKGEGKAIVPQFVAESRVTIEEL | | |
| | | Name: | DVASCKFSSTTLYCRQVNTRALPPLV | | |
| | | fusion | ASCLRGNYDDCQYTTEIGALSSRYITL | | |
| | | protein\| | DGGVLVNCKSIVCRCLNPSKIISQNTN | | |
| | | Gene | AAVTYVDATICKTIQLDDIQLQLEGSL | | |
| | | Symbol:F | SSVYARNISIEISQVTTSGSLDISSEIGNI | | |
| | | | NNTVNRVEDLIHQSEEWLAKVNPHIV | | |
| | | | NNTTLIVLCVLSALAVIWLAVLTAIIIY | | |
| | | | LRTKLKTISALAVTNTIQSNPYVNQTK | | |
| | | | RESKF | | |
| JN689227 | 4689-6521 | gb:JN689227: | MKLSVVYTTLLVSTFYSDLARSQLAL | 5 | 24 |
| | | 4689- | SELTKIGVIPGRSYDLKISTQASYQYM | | |
| | | 6521\| | VVKLIPNLTGLNNCTNGTIEAYKKML | | |
| | | Organism: | NRLLSPIDAALRKMKDAVNDKPPESV | | |
| | | Tailam | GNVKFWGAVIGGVALGVATSAQITA | | |
| | | virus\| | GVALHNSIQNANAILALKDSIRQSNKA | | |
| | | Strain | IQELQTAMSTTVVVLNALQDQINNQL | | |
| | | Name:TL8K | VPAINSLGCQVVANTLGLKLNQYFSEI | | |
| | | \|Protein | SLVFGPNLRDPTSETLSIQALSRAFNG | | |
| | | Name: | DFDSMLSKLKYDDSDFLDLLESDSIRG | | |
| | | fusion | RIIDVSLSDYLITIQIEYPALLSIKDAVI | | |
| | | protein\| | QTFNLISYNTRGTEWISIFPKQLLVRGT | | |
| | | Gene | YISNIDISQCVIAATSIICKSDTSTPISSA | | |
| | | Symbol:F | TWSCATGNITNCARTRVVNAHVPRFA | | |
| | | | LYGGVVFANCAPVVCKCQDPLYSINQ | | |
| | | | EPKVTNVMVDVDACKEMYLDGLYIT | | |
| | | | LGKTQISRAMYAEDVSLGGPISVDPID | | |
| | | | LGNEINSINSAINRSEEHLNHANELLD | | |
| | | | KVNPRIVNVKTFGVMIGLLVLVVLWC | | |
| | | | VITLVWLICLTKQLARTAYAGSMGSR | | |
| | | | ASTVNSLSGFVG | | |
| JX857409 | 4831-6615 | gb:JX857409: | MQVTTLRPAIILSIALLVTGQVPRDKL | 5 | 25 |
| | | 4831- | ANLGIIIKDSKALKIAGSYENRYIVLSL | | |
| | | 6615\| | VPTIDNVNGCGSIQIAKYKEMLERLLI | | |
| | | Organism: | PIKDALDLQESLIVIDNETVNNNYSPQ | | |
| | | Porcine | YRFVGAIIGTIALGVATAAQVTAGVA | | |
| | | parainfluenza | LMEAREAKRDISMLKEAIEKTQNSIEK | | |
| | | virus | LQNSAGEQILALKMLQDYVNGEIKPA | | |
| | | 1\|Strain | IEELGCETAALKLGIALTQHYTELTNA | | |
| | | Name:S206N | FGSNLGSIGEKSLTLQALSSLYKTNITN | | |
| | | \|Protein | ILTATNLGKTDIYDIIYAEQVKGRVID | | |
| | | Name: | VDLKRYMVTISVKIPILSEIPGVLIYEV | | |
| | | fusion | SSISYNIDGAEWYAAVPDHILSKSAYI | | |
| | | protein\| | GGADISDCIESRLTYICPQDPAQIIADN | | |
| | | Gene | QQQCFFGHLDKCPITKVIDNLVPKFAF | | |
| | | Symbol:F | INGGVVANCIASTCTCGEERIQVSQDR | | |
| | | | NKGVTFLTHNNCGLIGINGIEFHANKK | | |
| | | | GSDATWNVSPIGVGPAVSLRPVDISLQ | | |
| | | | IVAATNFLNSSRKDLMKAKEILNQVG | | |
| | | | NLKDLTTITIINIVIIIILLICVIGLGILYH | | |
| | | | QLRSALGMRDKMSVLNNSSYSLEPRT | | |
| | | | AQVQVIKPTSFMG | | |
| AY640317 | 2932-4571 | gb:AY640317: | MDVRICLLLFLISNPSSCIQETYNEESC | 4 | 26 |
| | | 2932- | STVTRGYKSVLRTGWYTNVFNLEIGN | | |
| | | 4571\| | VENITCNDGPSLIDTELVLTKNALREL | | |
| | | Organism: | KTVSADQVAKESRLSSPRRRRFVLGAI | | |
| | | Avian | ALGVATAAAVTAGVALAKTIRLEGEV | | |
| | | metapneu | KAIKNALRNTNEAVSTLGNGVRVLAT | | |
| | | movirus\| | AVNDLKEFISKKLTPAINQNKCNIADI | | |
| | | Strain | KMAISFGQNNRRFLNVVRQFSDSAGI | | |
| | | Name:LAHA | TSAVSLDLMTDDELVRAINRMPTSSG | | |
| | | \|Protein | QISLMLNNRAMVRRKGFGILIGVYDG | | |
| | | Name:F\| | TVVYMVQLPIFGVIETPCWRVVAAPL | | |
| | | Gene | CRKRRGNYACILREDQGWYCTNAGS | | |
| | | Symbol:F | TAYYPNKDDCEVRDDYVFCDTAAGI | | |
| | | | NVALEVDQCNYNISTSKYPCKVSTGR | | |
| | | | HPVSMVALTPLGGLVSCYESVSCSIGS | | |
| | | | NKVGIIKQLGKGCTHIPNNEADTITID | | |
| | | | NTVYQLSKVVGEQRTIKGAPVVNNFN | | |
| | | | PILFPVDQFNVALDQVFESIDRSQDLID | | |
| | | | KSNDLLGADAKSKAGIAIAIVVLVILG | | |
| | | | IFFLLAVIYYCSRVRKTKPKHDYPATT | | |
| | | | GHSSMAYVS | | |
| KU646513 | 4641-6498 | gb:KU646513: | MARFSWEIFRLSTILLIAQTCQGSIDGR | 4 | 27 |
| | | 4641- | LTLAAGIVPVGDRPISIYTSSQTGIIVV | | |
| | | 6498\| | KLIPNLPDNKKDCAKQSLQSYNETLS | | |
| | | Organism: | RILTPLATAMSAIRGNSTTQVRENRLV | | |
| | | Avian | GAIIGSVALGVATAAQITAATALIQAN | | |
| | | paramyxo | QNAANIARLANSIAKTNEAVTDLTEG | | |
| | | virus 13 | LGTLAIGVGKLQDYVNEQFNNTAVAI | | |
| | | goose/ | DCLTLESRLGIQLSLYLTELMGVFGNQ | | |
| | | Kazalchstan/5751/ | LTSPALTPITIQALYNLAGGNLNALLS | | |
| | | 2013\| | RLGASETQLGSLINSGLIKGMPIMYDD | | |
| | | Strain | ANKLLAVQVELPSIGKLNGARSTLLET | | |
| | | Name:AP | LAVDTTRGPSSPIIPSAVIEIGGAMEEL | | |
| | | MV- | DLSPCITTDLDMFCTKIISYPLSQSTLS | | |
| | | 13/white | CLNGNLSDCVFSRSEGVLSTPYMTIKG | | |
| | | fronted | KIVANCKQVICRCMDPPQILSQNYGE | | |
| | | goose/ | ALLLIDENTCRSLELSGVILKLAGTYE | | |
| | | Northern | SEYTRNLTVDPSQVIITGPLDISAELSK | | |
| | | Kazakhstan/ | VNQSIDSAKENIAESNKFLSQVNVKLL | | |
| | | 5751/2013 | SSSAMITYIVATVVCLIIAITGCVIGIYT | | |
| | | \|Protein | LTKLKSQQKTLLWLGNNAEMHGSRS | | |
| | | Name: | KTSF | | |
| | | fusion | | | |
| | | protein\| | | | |
| | | Gene | | | |
| | | Symbol:F | | | |
| AF326114 | 4818-6482 | gb:AF326114\| | MMPRVLGMIVLYLTHSQILCINRNTL | 3 | 28 |
| | | Organism: | YQIGLIHRSVKKVNFYSQGSPSYIVVK | | |
| | | Menangle | LVPTLAAIPPNCSIKSLQRYKETVTSLV | | |
| | | virus\|Strain | QPISDNLGYLQDKLVTGQSRRRRRFA | | |
| | | Name:UN | GVAIGLAALGVAAAAQATAAVALVE | | |
| | | KNOWN- | TRENAGKIQALSESIQNTNQAVHSLKT | | |
| | | AF326114 | ALGFSATAIQAIQNQVNEVINPAINKL | | |
| | | \|Protein | SCEVLDSQLASMLNLYLIHLTTVFQTQ | | |
| | | Name: | LTNPALTPLSIQALTSVLQGTSGVLMN | | |
| | | fusion | STNSTLTQPIDLLATGLITGQIISVNMT | | |
| | | protein\| | SLQLIIATFMPSIAELPNAVLHSFFRITT | | |
| | | Gene | SVNLTEVMIQSPEFIMEQNGVFYDFNT | | |
| | | Symbol:F | AHCQLGDNNVYCPYIDAARLSSMMT | | |
| | | | NCINGNLGECVFSRVIGSFPSRFVSLN | | |
| | | | GAILANCKFMRCNCLSPEKIITPLDGE | | |
| | | | MISLIDLRVCQKLTLGTITFEISQPVNV | | |
| | | | SFQGGFVANAGQIIVTNPFDISAELGQI | | |
| | | | NNSLNDAQGFLDQSNNWLKVSGWIN | | |
| | | | NSGSLFIAGIVVIGLIVLCIVIIIYINVQII | | |
| | | | REVNRLRSFIYRDYVLDHDKAPYSPES | | |
| | | | SSPHRKSLKTVS | | |
| GU206351 | 5441-7468 | gb:GU206351: | MLQLPLTILLSILSAHQSLCLDNSKLIH | 3 | 29 |
| | | 5441- | AGIMSTTEREVNVYAQSITGSIVVRLIP | | |
| | | 7468\| | NIPSNHKSCATSQIKLYNDTLTRLLTPI | | |
| | | Organism: | KANLEGLISAVSQDQSQNSGKRKKRF | | |
| | | Avian | VGAVIGAAALGLATAAQVTATVALN | | |
| | | paramyxo | QAQENARNILRLKNSIQKTNEAVMEL | | |
| | | virus | KDAVGQTAVAIDKTQAFINNQILPAIS | | |
| | | 5\|Strain | NLSCEVLGNKIGVQLSLYLTELTTVFG | | |
| | | Name:budgerigar/ | NQLTNPALTTLSLQALYNLCGDDFNY | | |
| | | Kunitachi/ | LINLLNAKNRNLASLYEANLIQGRITQ | | |
| | | 74\| | YDSMNQLLIIQVQIPSISTVSGMRVTEL | | |
| | | Protein | FTLSVDTPIGEGKALVPKYVLSSGRIM | | |
| | | Name: | EEVDLSSCAITSTSVFCSSIISRPLPLETI | | |
| | | fusion | NCLNGNVTQCQFTANTGTLESRYAVI | | |
| | | protein\| | GGLVIANCKAIVCRCLNPPGVIAQNLG | | |
| | | Gene | LPITIISSNTCQRINLEQITLSLGNSILST | | |
| | | Symbol:F | YSANLSQVEMNLAPSNPLDISVELNR | | |
| | | | VNTSLSKVESLIKESNSILDSVNPQILN | | |
| | | | VKTVIILAVIIGLIVVWCFILTCLIVRGF | | |
| | | | MLLVKQQKFKGLSVQNNPYVSNNSH | | |
| JQ001776 | 6129-8166 | gb:JQ001776: | MSNKRTTVLIIISYTLFYLNNAAIVGFD | 3 | 30 |
| | | 6129- | FDKLNKIGVVQGRVLNYKIKGDPMTK | | |
| | | 8166\| | DLVLKFIPNIVNITECVREPLSRYNETV | | |
| | | Organism: | RRLLLPIHNMLGLYLNNTNAKMTGL | | |
| | | Cedar | MIAGVIMGGIAIGIATAAQITAGFALY | | |
| | | virus\| | EAKKNTENIQKLTDSIMKTQDSIDKLT | | |
| | | Strain | DSVGTSILILNKLQTYINNQLVPNLELL | | |
| | | Name:CG | SCRQNKIEFDLMLTKYLVDLMTVIGP | | |
| | | la\|Protein | NINNPVNKDMTIQSLSLLFDGNYDIM | | |
| | | Name: | MSELGYTPQDFLDLIESKSITGQIIYVD | | |
| | | fusion | MENLYVVIRTYLPTLIEVPDAQIYEFN | | |
| | | glycoprotein | KITMSSNGGEYLSTIPNFILIRGNYMSN | | |
| | | \|Gene | IDVATCYMTKASVICNQDYSLPMSQN | | |
| | | Symbol:F | LRSCYQGETEYCPVEAVIASHSPRFAL | | |
| | | | TNGVIFANCINTICRCQDNGKTITQNIN | | |
| | | | QFVSMIDNSTCNDVMVDKFTIKVGKY | | |
| | | | MGRKDINNINIQIGPQIIIDKVDLSNEIN | | |
| | | | KNINQSLKDSIFYLREAKRILDSVNISLI | | |
| | | | SPSVQLFLIIISVLSFIILLIIIVYLYCKSK | | |
| | | | HSYKYNKFIDDPDYYNDYKRERINGK | | |
| | | | ASKSNNIYYVGD | | |
| LC168749 | 4869-7235 | gb:LC168749: | MGILFAALLAMTNPHLATGQIHWGNL | 2 | 31 |
| | | 4869- | SKIGVVGTGSASYKVMTQSSHQSLVI | | |
| | | 7235\| | KLMPNVTAIDNCTKTEIMEYKRLLGT | | |
| | | Organism: | VLKPIREALNAITKNIKPIQSSTTSRRH | | |
| | | Rinderpest | KRFAGVVLAGAALGVATAAQITAGIA | | |
| | | morbillivirus | LHQSMMNSQAIESLKASLETTNQAIEE | | |
| | | \|Strain | IRQAGQEMVLAVQGVQDYINNELVP | | |
| | | Name:Lv\| | AMGQLSCEIVGQKLGLKLLRYYTEILS | | |
| | | Protein | LFGPSLRDPVSAELSIQALSYALGGDI | | |
| | | Name:F | NKILEKLGYSGSDLLAILESKGIKAKIT | | |
| | | protein\| | YVDIESYFIVLSIAYPSLSEIKGVIVHRL | | |
| | | Gene | ESVSYNIGSQEWYTTVPRYVATQGYL | | |
| | | Symbol:F | ISNFDDTPCAFTPEGTICSQNALYPMSP | | |
| | | | LLQECFRGSTRSCARTLVSGSIGNRFIL | | |
| | | | SKGNLIANCASILCKCYTTGSIISQDPD | | |
| | | | KILTYIAADQCPVVEVGGVTIQVGSRE | | |
| | | | YSDAVYLHEIDLGPPISLEKLDVGTNL | | |
| | | | WNAVTKLEKAKDLLDSSDLILENIKG | | |
| | | | VSVTNTGYILVGVGLIAVVGILIITCCC | | |
| | | | KKRRSDNKVSTMVLNPGLRPDLTGTS | | |
| | | | KSYVRSL | | |
| LC187310 | 6250-7860 | gb:LC187310: | MTRTRLLFLLTCYIPGAVSLDNSILAP | 2 | 32 |
| | | 6250- | AGIISASERQIAIYTQTLQGTIALRFIPV | | |
| | | 7860\| | LPQNLSSCAKDTLESYNSTVSNLLLPI | | |
| | | Organism: | AENLNALLKDADKPSQRIIGAIIGSVA | | |
| | | Avian | LGVATTAQVTAALAMTQAQQNARNI | | |
| | | paramyxo | WKLKESIKNTNQAVLELKDGLQQSAI | | |
| | | virus | ALDKVQSFINSEILPQINQLGCEVAAN | | |
| | | 10\|Strain | KLGIFLSLYLTEITTVFKNQITNPALST | | |
| | | Name:rAP | LSYQALYNLCGGNMAALTKQIGIKDT | | |
| | | MV-10- | EINSLYEAELITGQVIGYDSADQILLIQ | | |
| | | FI324/Ym | VSYPSVSRVQGVRAVELLTVSVATPK | | |
| | | HA\|Protein | GEGKAIAPSFIAQSNIIAEELDTQPCKF | | |
| | | Name: | SKTTLYCRQVNTRTLPVRVANCLKGK | | |
| | | fusion | YNDCQYTTEIGALASRYVTITNGVVA | | |
| | | protein\| | NCRSIICRCLDPEGIVAQNSDAAITVID | | |
| | | Gene | RSTCKLIQLGDITLRLEGKLSSSYSKNI | | |
| | | Symbol:F | TIDISQVTTSGSLDISSELGSINNTITKV | | |
| | | | EDLISKSNDWLSKVNPTLISNDTIIALC | | |
| | | | VIAGIVVIWLVIITILSYYILIKLKNVAL | | |
| | | | LSTMPKKDLNPYVNNTKF | | |
| NC_005283 | 5277-6935 | gb:NC_005283: | MAASNGGVMYQSFLTIIILVIMTEGQI | 2 | 33 |
| | | 5277- | HWGNLSKIGIVGTGSASYKVMTRPNH | | |
| | | 6935\| | QYLVIKLMPNVTMIDNCTRTEVTEYR | | |
| | | Organism: | KLLKTVLEPVKNALTVITKNIKPIQSLT | | |
| | | Dolphin | TSRRSKRFAGVVLAGVALGVATAAQI | | |
| | | morbillivirus | TAGVALHQSIMNSQSIDNLRTSLEKSN | | |
| | | \|S train | QAIEEIRQASQETVLAVQGVQDFINNE | | |
| | | Name:UN | LIPSMHQLSCEMLGQKLGLKLLRYYT | | |
| | | KNOWN- | EILSIFGPSLRDPVSAEISIQALSYALGG | | |
| | | NC_005283 | DINKILEKLGYSGADLLAILESRGIKA | | |
| | | \|Protein | KVTHVDLEGYFIVLSIAYPTLSEVKGV | | |
| | | Name: | IVHKLEAVSYNLGSQEWYTTLPKYVA | | |
| | | fusion | TNGYLISNFDESSCAFMSEVTICSQNA | | |
| | | protein\| | LYPMSPLLQQCLRGSTASCARSLVSG | | |
| | | Gene | TIGNRFILSKGNLIANCASVLCKCYST | | |
| | | Symbol:F | GTIISQDPDKLLTFVAADKCPLVEVDG | | |
| | | | ITIQVGSREYPDSVYVSRIDLGPAISLE | | |
| | | | KLDVGTNLGSALTKLDNAKDLLDSSN | | |
| | | | QILENVRRSSFGGAMYIGILVCAGALV | | |
| | | | ILCVLVYCCRRHCRKRVQTPPKATPG | | |
| | | | LKPDLTGTTKSYVRSL | | |
| NC_005339 | 5374-7602 | gb:NC_005339: | MSNYFPARVIIIVSLITAVSCQISFQNLS | 2 | 34 |
| | | 5374- | TIGVFKFKEYDYRVSGDYNEQFLAIK | | |
| | | 7602\| | MVPNVTGVENCTASLIDEYRHVIYNL | | |
| | | Organism: | LQPINTTLTASTSNVDPYAGNKKFFGA | | |
| | | Mossman | VIAGVALGVATAAQVTAGVALYEAR | | |
| | | virus\| | QNAAAIAEIKESLHYTHKAIESLQISQ | | |
| | | Strain | KQTVVAIQGIQDQINTNIIPQINALTCEI | | |
| | | Name:UN | ANQRLRLMLLQYYTEMLSSFGPIIQDP | | |
| | | KNOWN- | LSGHITVQALSQAAGGNITGLMRELG | | |
| | | NC_005339 | YSSKDLRYILSVNGISANIIDADPEIGSI | | |
| | | \|Protein | ILRIRYPSMIKIPDVAVMELSYLAYHA | | |
| | | Name: | AGGDWLTVGPRFILKRGYSLSNLDITS | | |
| | | fusion | CTIGEDFLLCSKDVSSPMSLATQSCLR | | |
| | | protein\| | GDTQMCSRTAVQDREAPRFLLLQGNL | | |
| | | Gene | IVNCMSVNCKCEDPEETITQDPAYPL | | |
| | | Symbol:F | MVLGSDTCKIHYIDGIRIKLGKVQLPPI | | |
| | | | TVLNTLSLGPIVVLNPIDVSNQLSLVE | | |
| | | | TTVKESEDHLKNAIGALRSQSRVGGV | | |
| | | | GIVAIVGLIIATVSLVVLVISGCCLVKY | | |
| | | | FSRTATLESSLTTIEHGPTLAPKSGPIIP | | |
| | | | TYINPVYRHD | | |
| NC_007454 | 4635-6384 | gb:NC_007454: | MKPVALIYLTILAFTVKVRSQLALSDL | 2 | 35 |
| | | 4635- | TKIGIIPAKSYELKISTQAAQQLMVIKL | | |
| | | 6384\| | IPNVNGLTNCTIPVMDSYKKMLDRIL | | |
| | | Organism: | KPIDDALNHVKNAIQDKQGDGVPGV | | |
| | | J- | RFWGAIIGGVALGVATSAQITAGVAL | | |
| | | virus\| | HNSIQNANAILQLKESIRNSNKAIEELQ | | |
| | | Strain | AGLQSTVLVINALQDQINSQLVPAINT | | |
| | | Name:UN | LGCSVIANTLGLRLNQYFSEISLVFGP | | |
| | | KNOWN- | NLRDPTSQTLSIQAIAKAFNGDFDSM | | |
| | | NC_007454 | MKKMHYTDSDFLDLLESDSIRGRIISV | | |
| | | \|Protein | SLEDYLIIIQIDYPGLTTIPNSVVQTFNL | | |
| | | Name: | ITYNYKGTEWESIFPRELLIRGSYISNI | | |
| | | fusion | DISQCVGTSKSMICKSDTSTTISPATW | | |
| | | protein\| | ACATGNLTSCARTRVVNSHSTRFALS | | |
| | | Gene | GGVLFANCAPIACRCQDPQYSINQEPK | | |
| | | Symbol:F | TTNVMVTSEDCKELYIDGFYLTLGKK | | |
| | | | MLDRAMYAEDVALGGSVSVDPIDIGN | | |
| | | | ELNSINESINKSHEYLDKANELLEQVN | | |
| | | | PNIVNVSSFSFILVISILLIIWFIVTLVWL | | |
| | | | IYLTKHMNFIVGKVAMGSRSSTVNSL | | |
| | | | SGFVG | | |
| NC_009489 | 4620-6500 | gb:NC_009489: | MRSSLFLVLTLLVPFAHSIDSITLEQYG | 2 | 36 |
| | | 4620- | TVITSVRSLAYFLETNPTYISVRLMPAI | | |
| | | 6500\| | QTDSSHCSYHSIENYNLTLTKLLLPLQ | | |
| | | Organism: | ENLHQITDSLSSRRRKKRFAGVAVGL | | |
| | | Mapuera | AALGVATAAQVTAAIAVVKAKENSA | | |
| | | virus\| | KIAQLTSAISETNRAVQDLIEGSKQLA | | |
| | | Strain | VAVQAIQDQINNVIQPQLTNLSCQVA | | |
| | | Name:Be | DAQVGTILNMYLTELTTVFHPQITNSA | | |
| | | Ann | LTPITIQALRSLLGSTLPQVVTSTIKTD | | |
| | | 370284\| | VPLQDLLTSGLLKGQIVYLDLQSMIM | | |
| | | Protein | VVSVSVPTIALHSMAKVYTLKAISAH | | |
| | | Name: | VNNAEVQMQVPSRVMELGSEIMGYD | | |
| | | ofusin | IDQCEETSRYLFCPYNGGSILSATMKM | | |
| | | protein\| | CLNGNISQCVFTPIYGSFLQRFVLVDG | | |
| | | Gene | VIVANCRDMTCACKSPSKIITQPDSLP | | |
| | | Symbol:F | VTIIDSTSCSNLVLDTLELPIISINNATY | | |
| | | | RPVQYVGPNQIIFSQPLDLLSQLGKINS | | |
| | | | SLSDAIEHLAKSDEILEQIQWDSPQGY | | |
| | | | TLIALTSVLAFVVVAIVGLLISTRYLIF | | |
| | | | EIRRINTTLTQQLSSYVLSNKIIQY | | |
| NC_017937 | 4534-6330 | gb:NC_017937: | MAEQEKTPLRYKILLIIIVINHYNITNV | 2 | 37 |
| | | 4534- | FGQIHLANLSSIGVFVTKTLDYRTTSD | | |
| | | 6330\| | PTEQLLVINMLPNISNIQDCAQGVVNE | | |
| | | Organism: | YKHLISSLLTPINDTLDLITSNINPYSGR | | |
| | | Nariva | NKLFGEIIAGAALTVATSAQITAGVAL | | |
| | | virus\| | YEARQNAKDIAAIKESLGYAYKAIDK | | |
| | | Strain | LTTATREITVVINELQDQINNRLIPRIN | | |
| | | Name:UN | DLACEVWATRLQAMLLQYYAEIFSVI | | |
| | | KNOWN- | GPNLQDPLSGKISIQALARAAGGNIKL | | |
| | | NC_017937 | MVDELNYSGQDLSRLVKVGAIKGQII | | |
| | | \|Protein | DADPSLGVVIIKMRYPNIIKIPNVAISE | | |
| | | Name: | LSYVSYSSDGQDWITTGPNYIVTRGYS | | |
| | | fusion | IANIQTSSCSVGDDFVLCDRDMTYPM | | |
| | | protein\| | SQVTQDCLRGNIALCSRMVVRDREAP | | |
| | | Gene | RYLILQGNMVANCMSITCRCEEPESEI | | |
| | | Symbol:F | YQSPDQPLTLLTRDTCDTHVVDGIRIR | | |
| | | | LGVRKLPTISVINNITLGPIITTDPIDVS | | |
| | | | NQLNAVVSTIDQSAELLHQAQRVLSE | | |
| | | | RARGARDHILATAAIVICVVLAVLILV | | |
| | | | LLIGLVYLYRTQNEILVKTTMLEQVPT | | |
| | | | FAPKSFPMESQIYSGKTNKGYDPAE | | |
| NC_025256 | 6865-8853 | gb:NC_ | MKKKTDNPTISKRGHNHSRGIKSRAL | 2 | 38 |
| | | 025256:6865- | LRETDNYSNGLIVENLVRNCHHPSKN | | |
| | | 8853\| | NLNYTKTQKRDSTIPYRVEERKGHYP | | |
| | | Organism: | KIKHLIDKSYKHIKRGKRRNGHNGNII | | |
| | | Bat | TIILLLILILKTQMSEGAIHYETLSKIGLI | | |
| | | Paramyxo | KGITREYKVKGTPSSKDIVIKLIPNVTG | | |
| | | virus | LNKCTNISMENYKEQLDKILIPINNIIE | | |
| | | Eid_hel/G | LYANSTKSAPGNARFAGVIIAGVALG | | |
| | | H- | VAAAAQITAGIALHEARQNAERINLL | | |
| | | M74a/GHA/ | KDSISATNNAVAELQEATGGIVNVITG | | |
| | | 2009\| | MQDYINTNLVPQIDKLQCSQIKTALDI | | |
| | | Strain | SLSQYYSEILTVFGPNLQNPVTTSMSI | | |
| | | Name:Bat | QAISQSFGGNIDLLLNLLGYTANDLLD | | |
| | | PV/Eid_ | LLESKSITGQITYINLEHYFMVIRVYYP | | |
| | | hel/GH- | IMTTISNAYVQELIKISFNVDGSEWVS | | |
| | | M74a/ | LVPSYILIRNSYLSNIDISECLITKNSVI | | |
| | | GHA/2009\| | CRHDFAMPMSYTLKECLTGDTEKCPR | | |
| | | Protein | EAVVTSYVPRFAISGGVIYANCLSTTC | | |
| | | Name: | QCYQTGKVIAQDGSQTLMMIDNQTCS | | |
| | | fusion | IVRIEEILISTGKYLGSQEYNTMHVSV | | |
| | | protein\| | GNPVFTDKLDITSQISNINQSIEQSKFY | | |
| | | Gene | LDKSKAILDKINLNLIGSVPISILFIIAIL | | |
| | | Symbol:F | SLILSIITFVIVMIIVRRYNKYTPLINSDP | | |
| | | | SSRRSTIQDVYIIPNPGEHSIRSAARSID | | |
| | | | RDRD | | |
| NC_025347 | 4471-6386 | gb:NC_025347: | MRVRPLIIILVLLVLLWLNILPVIGLDN | 2 | 39 |
| | | 4471- | SKIAQAGIISAQEYAVNVYSQSNEAYI | | |
| | | 6386\| | ALRTVPYIPPHNLSCFQDLINTYNTTIQ | | |
| | | Organism: | NIFSPIQDQITSITSASTLPSSRFAGLVV | | |
| | | Avian | GAIALGVATSAQITAAVALTKAQQNA | | |
| | | paramyxo | QEIIRLRDSIQNTINAVNDITVGLSSIGV | | |
| | | virus | ALSKVQNYLNDVINPALQNLSCQVSA | | |
| | | 7\|Strain | LNLGIQLNLYLTEITTIFGPQITNPSLTP | | |
| | | Name:AP | LSIQALYTLAGDNLMQFLTRYGYGET | | |
| | | MV- | SVSSILESGLISAQIVSFDKQTGIAILYV | | |
| | | 7/dove/ | TLPSIATLSGSRVTKLMSVSVQTGVGE | | |
| | | Tennessee/4/ | GSAIVPSYVIQQGTVIEEFIPDSCIFTRS | | |
| | | 75\|Protein | DVYCTQLYSKLLPDSILQCLQGSMAD | | |
| | | Name: | CQFTRSLGSFANRFMTVAGGVIANCQ | | |
| | | fusion | TVLCRCYNPVMIIPQNNGIAVTLIDGS | | |
| | | protein\| | LCKELELEGIRLTMADPVFASYSRDLII | | |
| | | Gene | NGNQFAPSDALDISSELGQLNNSISSA | | |
| | | Symbol:F | TDNLQKAQESLNKSIIPAATSSWLIILL | | |
| | | | FVLVSISLVIGCISIYFIYKHSTTNRSRN | | |
| | | | LSSDIISNPYIQKAN | | |
| NC_025348 | 4790-6570 | gb:NC_ | MAPCVLFLSSLLLISTISPSHGINQPAL | 2 | 40 |
| | | 025348:4790- | RRIGAIVSSVKQLKFYSKTKPNYIIVKL | | |
| | | 6570\| | LPTINLSKSNCNLTSINRYKESVIEIIKP | | |
| | | Organism: | LADNIDNLNQKLLPKNRRKRMAGVAI | | |
| | | Tuhoko | GLAALGVAAAAQATAAVALVEARKN | | |
| | | virus | TQMIQSLADSIQDTNAAVQAVNIGLQ | | |
| | | 2\|Strain | NSAVAIQAIQNQINNVINPALDRLNCE | | |
| | | Name:UN | VLDAQIASILNLYLIKSVTIFQNQLTNP | | |
| | | KNOWN- | ALQQLSIQMLSIVMQDTAKILGNFTIG | | |
| | | NC_025348 | DKFDQHDLLGSGLITGQVVGVNLTNL | | |
| | | \|Protein | QLIIAAFIPSIAPLPQAYIIDLISITISVND | | |
| | | Name: | TEAVIQIPERIMEHGSSIYQFGGKQCV | | |
| | | fusion | YGQFSAYCPFSDAVLMTQDLQLCMK | | |
| | | protein\| | GNIEHCIFSSVLGSFPNRFASVDGVFY | | |
| | | Gene | ANCKYMSCACSDPLQVIHQDDSVNL | | |
| | | Symbol:F | MVIDSSVCRSLTLGHVTFPIIAFSNVSY | | |
| | | | QMKTNISIEQMIVTSPLDLSTELKQINN | | |
| | | | SVNIANTFLDSSNRALKTSIFGTSSQIIL | | |
| | | | IVLLIFTCLLILYVIFLTYIIKILIKEVKR | | |
| | | | LRDGNSRTGSKLSFINPDV | | |
| NC_025350 | 4663-6428 | gb:NC_ | MLWLTILIALVGNHESTCMNINFLQSL | 2 | 41 |
| | | 025350:4663- | GQINSQKRFLNFYTQQPPSYMVIRLVP | | |
| | | 6428\| | TLQLSANNCTLGSIVRYRNAIKELIQP | | |
| | | Organism: | MDENLRWLSSNLIPQRRGKRFAGVAV | | |
| | | Tuhoko | GLAALGVAVAAQATAAVALVEARAN | | |
| | | virus | AEKIASMSQSIQETNKAVTSLSQAVSA | | |
| | | 3\|Strain | SGIAIQAIQNEINNVIHPILNQVQCDVL | | |
| | | Name:UN | DARVGNILNLYLIKVTTIFQNQLTNPA | | |
| | | KNOWN- | LQRLSTQALSMLMQSTSSYLRNLSSSE | | |
| | | NC_025350 | SAINADLSMTNLIEAQIVGINMTNLQL | | |
| | | \|Protein | VLAVFIPSIARLNGALLYDFISITISSNQ | | |
| | | Name: | TEVMLQIPHRVLEIGNSLYTFEGTQCE | | |
| | | fusion | MTKLNAYCLYSDAIPVTESLRDCMNG | | |
| | | protein\| | LFSQCGFVRIIGSFANRFASVNGVIYA | | |
| | | Gene | NCKHLTCSCLQPDEIITQDTNVPLTIID | | |
| | | Symbol:F | TKRCTKISLGHLTFTIREYANVTYSLR | | |
| | | | TEIANSQITVVSPLDLSSQLTTINNSLA | | |
| | | | DATNHIMNSDRILDRLNSGLYSKWVII | | |
| | | | FLICASIVSLIGLVFLGFLIRGLILELRS | | |
| | | | KHRSNLNKASTYSIDSSIGLT | | |
| NC_025352 | 5950-8712 | gb:NC_ | MALNKNMFSSLFLGYLLVYATTVQSS | 2 | 42 |
| | | 025352:5950- | IHYDSLSKVGVIKGLTYNYKIKGSPST | | |
| | | 8712\| | KLMVVKLIPNIDSVKNCTQKQYDEYK | | |
| | | Organism: | NLVRKALEPVKMAIDTMLNNVKSGN | | |
| | | Mojiang | NKYRFAGAIMAGVALGVATAATVTA | | |
| | | virus\| | GIALHRSNENAQAIANMKSAIQNTNE | | |
| | | Strain | AVKQLQLANKQTLAVIDTIRGEINNNI | | |
| | | Name: | IPVINQLSCDTIGLSVGIRLTQYYSEIIT | | |
| | | Tongguan1\| | AFGPALQNPVNTRITIQAISSVFNGNF | | |
| | | Protein | DELLKIMGYTSGDLYEILHSELIRGNII | | |
| | | Name: | DVDVDAGYIALEIEFPNLTLVPNAVV | | |
| | | fusion | QELMPISYNIDGDEWVTLVPRFVLTRT | | |
| | | protein\| | TLLSNIDTSRCTITDSSVICDNDYALPM | | |
| | | Gene | SHELIGCLQGDTSKCAREKVVSSYVP | | |
| | | Symbol:F | KFALSDGLVYANCLNTICRCMDTDTP | | |
| | | | ISQSLGATVSLLDNKRCSVYQVGDVLI | | |
| | | | SVGSYLGDGEYNADNVELGPPIVIDKI | | |
| | | | DIGNQLAGINQTLQEAEDYIEKSEEFL | | |
| | | | KGVNPSIITLGSMVVLYIFMILIAIVSVI | | |
| | | | ALVLSIKLTVKGNVVRQQFTYTQHVP | | |
| | | | SMENINYVSH | | |
| NC_025363 | 4622-6262 | gb:NC_ | MAIPVPSSTALMIFNILVSLAPASALD | 2 | 43 |
| | | 025363:4622- | GRLLLGAGIVPTGDRQVNVYTSSQTGI | | |
| | | 6262\| | IALKLLPNLPKDKENCAEVSIRSYNET | | |
| | | Organism: | LTRILTPLAQSMAAIRGNSTVSTRGRE | | |
| | | Avian | PRLVGAIIGGVALGVATAAQITAATAL | | |
| | | paramyxo | IQANQNAENIARLAKGLAATNEAVTD | | |
| | | virus | LTKGVGSLAIGVGKLQDYVNEQFNRT | | |
| | | 12\|Strain | GEAIECLTIESRVGVQLSLYLTEVIGVF | | |
| | | Name: | GDQITSPALSDISIQALYNLAGGNLNV | | |
| | | gWieon/Italy/ | LLQKMGIEGTQLGSLINSGLIKGRPIM | | |
| | | 3920_1/2005 | YDDGNKILGIQVTLPSVGRINGARATL | | |
| | | \|Protein | LEAIAVATPKGNASPLIPRAVISVGSLV | | |
| | | Name: | EELDMTPCVLTPTDIFCTRILSYPLSDS | | |
| | | fusion | LTTCLKGNLSSCVFSRTEGALSTPYVS | | |
| | | protein\| | VHGKIVANCKSVVCRCVEPQQIISQN | | |
| | | Gene | YGEALSLIDESLCRILELNGVILKMDG | | |
| | | Symbol:F | QFTSEYTKNITIDPVQVIISGPIDISSELS | | |
| | | | QVNQSLDSALENIKESNSYLSKVNVK | | |
| | | | LISSSAMITYIVITVICLILTFVALVLGI | | |
| | | | YSYTKIRSQQKTLIWMGNNIARSKEG | | |
| | | | NRF | | |
| NC_025373 | 4617-6582 | gb:NC_ | MASPMVPLLIITVVPALISSQSANIDKL | 2 | 44 |
| | | 025373:4617- | IQAGIIMGSGKELHIYQESGSLDLYLR | | |
| | | 6582\| | LLPVIPSNLSHCQSEVITQYNSTVTRLL | | |
| | | Organism: | SPIAKNLNHLLQPRPSGRLFGAVIGSIA | | |
| | | Avian | LGVATSAQISAAIALVRAQQNANDIL | | |
| | | paramyxo | ALKAAIQSSNEAIKQLTYGQEKQLLAI | | |
| | | virus | SKIQKAVNEQVIPALTALDCAVLGNK | | |
| | | 3\|Strain | LAAQLNLYLIEMTTIFGDQINNPVLTPI | | |
| | | Name: | PLSYLLRLTGSELNDVLLQQTRSSLSLI | | |
| | | turkey/Wisconsin/ | HLVSKGLLSGQIIGYDPSVQGIIIRIGLI | | |
| | | 68\| | RTQRIDRSLVFXPYVLPITISSNIATPIIP | | |
| | | Protein | DCVVKKGVIIEGMLKSNCIELERDIIC | | |
| | | Name: | KTINTYQITKETRACLQGNITMCKYQ | | |
| | | fusion | QSRTQLSTPFITYNGVVIANCDLVSCR | | |
| | | protein\| | CIRPPMIITQVKGYPLTIINRNLCTELS | | |
| | | Gene | VDNLILNIETNHNFSLNPTIIDSQSRLIA | | |
| | | Symbol:F | TSPLEIDALIQDAQHHAAAALLKVEES | | |
| | | | NAHLLRVTGLGSSSWHIILILTLLVCTI | | |
| | | | AWLIGLSIYVCRIKNDDSTDKEPTTQS | | |
| | | | SNRGIGVGSIQYMT | | |
| NC_025386 | 5548-7206 | gb:NC_ | MNPLNQTLIAKVLGFLLLSSSFTVGQI | 2 | 45 |
| | | 025386:5548- | GFENLTRIGVHQVKQYGYKLAHYNS | | |
| | | 7206\| | HQLLLIRMIPTVNGTHNCTHQVITRYR | | |
| | | Organism: | EMVREIITPIKGALDIMKKAVSPDLVG | | |
| | | Salem | ARIFGAIVAGAALGIATSAQITAGVAL | | |
| | | virus\| | HRTKLNGQEISKLKEAVSLTNEAVEQ | | |
| | | Strain | LQYSQGKSILAIQGIQDFINFNVVPLLE | | |
| | | Name:UN | EHTCGIAKLHLEMALMEYFQKLILVF | | |
| | | KNOWN- | GPNLRDPIGSTIGIQALATLFQNNMFE | | |
| | | NC_025386 | VSLRLGYAGDDLEDVLQSNSIRANIIE | | |
| | | \|Protein | AEPDSGFIVLAIRYPTLTLVEDQVITEL | | |
| | | Name: | AHITFNDGPQEWVATIPQFVTYRGLV | | |
| | | fusion | LANIDVSTCTFTERNVICARDQTYPMII | | |
| | | protein\| | DLQLCMRGNIAKCGRTRVTGSTASRF | | |
| | | ne | LLKDGNMYANCIATMCRCMSSSSIIN | | |
| | | GeSymbol:F | QEPSHLTTLIVKETCSEVMIDTIRITLG | | |
| | | | ERKHPPIDYQTTITLGQPIALAPLDVGT | | |
| | | | ELANAVSYLNKSKVLLEHSNEVLSSV | | |
| | | | STAHTSLTATIVLGIVVGGLAILIVVMF | | |
| | | | LFLEAQVIKVQRAMMLCPITNHGYLP | | |
| | | | NEDLLTRGHSIPTIG | | |
| NC_025390 | 4805-6460 | gb:NC_ | MGYFHLLLILTAIAISAHLCYTTTLDG | 2 | 46 |
| | | 025390:4805- | RKLLGAGIVITEEKQVRVYTAAQSGTI | | |
| | | 6460\| | VLRSFRVVSLDRYSCMESTIESYNKTV | | |
| | | Organism: | YNILAPLGDAIRRIQASGVSVERIREGR | | |
| | | Avian | IFGAILGGVALGVATAAQITAAIALIQ | | |
| | | paramyxo | ANENAKNILRIKDSITKTNEAVRDVTN | | |
| | | virus | GVSQLTIAVGKLQDFVNKEFNKTTEAI | | |
| | | 9\|Strain | NCVQAAQQLGVELSLYLTEITTVFGP | | |
| | | Name:duck/ | QITSPALSKLTIQALYNLAGVSLDVLL | | |
| | | New | GRLGADNSQLSSLVSSGLITGQPILYD | | |
| | | York/22/1978 | SESQILALQVSLPSISDLRGVRATYLDT | | |
| | | \|Protein | LAVNTAAGLASAMIPKVVIQSNNIVEE | | |
| | | Name: | LDTTACIAAEADLYCTRITTFPIASAVS | | |
| | | fusion | ACILGDVSQCLYSKTNGVLTTPYVAV | | |
| | | protein\| | KGKIVANCKHVTCRCVDPTSIISQNYG | | |
| | | Gene | EAATLIDDQLCKVINLDGVSIQLSGTF | | |
| | | Symbol:F | ESTYVRNVSISANKVIVSSSIDISNELE | | |
| | | | NVNSSLSSALEKLDESDAALSKVNVH | | |
| | | | LTSTSAMATYIVLTVIALILGFVGLGL | | |
| | | | GCFAMIKVKSQAKTLLWLGAHADRS | | |
| | | | YILQSKPAQSST | | |
| NC_025403 | 4826-6649 | gb:NC_ | MWIMIILSLFQIIPGVTPINSKVLTQLG | 2 | 47 |
| | | 025403:4826- | VITKHTRQLKFYSHSTPSYLVVKLVPT | | |
| | | 6649\| | INTESTVCNFTSLSRYKDSVRELITPLA | | |
| | | Organism: | KNIDNLNSILTIPKRRKRMAGVVIGLA | | |
| | | Achimota | ALGVAAAAQATAAVALIEAKKNTEQI | | |
| | | virus | QALSESIQNTNKAVSSIEKGLSSAAIA | | |
| | | 1\|Strain | VQAIQNQINNVINPALTALDCGVTDA | | |
| | | Name:UN | QLGNILNLYLIKTLTVFQKQITNPALQ | | |
| | | KNOWN- | PLSIQALNIIMQETSSVLRNFTKTDEIE | | |
| | | NC_025403 | HTDLLTSGLITGQVVGVNLTNLQLIIA | | |
| | | }Protein | AFIPSIAPLNQAYILDFIRITVNINNSES | | |
| | | Name: | MIQIPERIMEHGISLYQFGGDQCTFSD | | |
| | | fusion | WSAYCPYSDATLMAPGLQNCFRGQA | | |
| | | protein\| | ADCVFSTVMGSFPNRFVSVQGVFYVN | | |
| | | Gene | CKFIRCACTQPQRLITQDDSLSLTQIDA | | |
| | | Symbol:F | KTCRMLTLGFVQFSINEYANVTYSFK | | |
| | | | NNVTAGQLIMTNPIDLSTEIKQMNDS | | |
| | | | VDEAARYIEKSNAALNKLMYGGRSDI | | |
| | | | VTTVLLVGFILLVVYVIFVTYILKILM | | |
| | | | KEVARLRNSNHPDLIKPYNYPM | | |
| NC_025404 | 4772-6647 | gb:NC_ | MLNSFYQIICLAVCLTTYTVISIDQHNL | 2 | 48 |
| | | 025404:4772- | LKAGVIVKSIKGLNFYSRGQANYIIVK | | |
| | | 6647\| | LIPNVNVTDTDCDIGSIKRYNETVYSLI | | |
| | | Organism: | KPLADNIDYLRTQFAPTKRKKRFAGV | | |
| | | Achimota | AIGLTALGVATAAQVTAAVALVKAQ | | |
| | | virus | ENARKLDALADSIQATNEAVQDLSTG | | |
| | | 2\|Strain | LQAGAIAIQAIQSEINHVINPALERLSC | | |
| | | Name:UN | EIIDTRVASILNLYLIRLTTVFHRQLVN | | |
| | | KNOWN- | PALTPLSIQALNHLLQGETEGLVKNES | | |
| | | NC_025404 | KMTDSKIDLLMSGLITGQVVGVNIKH | | |
| | | \|Protein | MQLMIAVFVPTTAQLPNAYVINLLTIT | | |
| | | Name: | ANINNSEVLVQLPNQILERSGIIYQFRG | | |
| | | fusion | KDCVSSPNHMYCPYSDASILSPELQLC | | |
| | | protein\| | LQGRLEMCLFTQVVGSFPTRFASDKGI | | |
| | | Gene | VYANCRHLQCACSEPEGIIYQDDTSAI | | |
| | | Symbol:F | TQIDASKCSTLKLDMLTFKLSTYANK | | |
| | | | TFDASFSVGKDQMLVTNLLDLSAELK | | |
| | | | TMNASVAHANKLIDKSNLLIQSNALIG | | |
| | | | HSNTIFIVVIVILAVMVLYLIIVTYIIKVI | | |
| | | | MVEVSRLKRMNIYSIDK | | |
| NC_025410 | 4958-6751 | gb:NC_ | MVTIIKPLILLVTVILQISGHIDTTALTS | 2 | 49 |
| | | 025410:4958- | IGAVIASSKEIMYYAQSTPNYIVIKLIP | | |
| | | 6751\| | NLPNIPSQCNFSSIAYYNKTLLDLFTPI | | |
| | | Organism: | SDNINMLHQRLSNTGRNRRFAGVAIG | | |
| | | Tuhoko | LAALGVATAAQVTAAFALVEAKSNT | | |
| | | virus | AKIAQIGQAIQNTNAAINSLNAGIGGA | | |
| | | 1\| train | VTAIQAIQTQINGIITDQINAATCTALD | | |
| | | Name:UN | AQIGTLLNMYLLQLTTTFQPQIQNPAL | | |
| | | KNOWN- | QPLSIQALHRIMQGTSIVLSNLTDSSK | | |
| | | NC_025410 | YGLNDALSAGLITGQIVSVDLRLMQIT | | |
| | | \|Protein | IAANVPTLSRLENAIAHDIMRITTNVN | | |
| | | Name: | NTEVIVQLPETIMEHAGRLYQFNKDH | | |
| | | fusion | CLSSTQRFFCPYSDAKLLTSKISSCLSG | | |
| | | protein\| | IRGDCIFSPVVGNFATRFISVKGVIIAN | | |
| | | Gene | CKFIRCTCLQPEGIISQLDDHTLTVIDL | | |
| | | Symbol:F | KLCNKLDLGLIQFDLQVLSNISYEMTL | | |
| | | | NTSQNQLILTDPLDLSSELQTMNQSIN | | |
| | | | NAANFIEKSNSLLNSSTYEFNRSVALL | | |
| | | | VALILLSLTILYVIVLTCVVKLLVHEVS | | |
| | | | KNRRHIQDLESHHK | | |
| NC_028249 | 4850-7055 | gb:NC_ | MTRVKKLPVPTNPPMHHSLDSPFLNP | 2 | 50 |
| | | 028249:4850- | EHATGKISITDDTSSQLTNFLYHKYHK | | |
| | | 7055\| | TTINHLSRTISGTDPPSAKLNKFGSPILS | | |
| | | Organism: | TYQIRSALWWIAMVILVHCVMGQIH | | |
| | | Phocine | WTNLSTIGIIGTDSSHYKIMTRSSHQY | | |
| | | distemper | LVLKLMPNVSIIDNCTKAELDEYEKLL | | |
| | | virus\| | NSVLEPINQALTLMTKNVKSLQSLGS | | |
| | | Strain | GRRQRRFAGVVIAGAALGVATAAQIT | | |
| | | Name: | AGVALYQSNLNAQAIQSLRASLEQSN | | |
| | | PDV/Wadden_ | KAIDEVRQASQNIIIAVQGVQDYVNN | | |
| | | Sea.NLD/ | EIVPALQHMSCELIGQRLGLKLLRYYT | | |
| | | 1988\| | ELLSVFGPSLRDPVSAEISIQALSYALG | | |
| | | Protein | GEIHKILEKLGYSGNDMVAILETKGIR | | |
| | | Name: | AKITHVDLSGKFIVLSISYPTLSEVKGV | | |
| | | fusion | VVHRLEAVSYNIGSQEWYTTVPRYVA | | |
| | | protein\| | TNGYLISNFDESSCVFVSESAICSQNSL | | |
| | | Gene | YPMSPILQQCLRGETASCARTLVSGTL | | |
| | | Symbol:F | GNKFILSKGNIIANCASILCKCHSTSKII | | |
| | | | NQSPDKLLTFIASDTCSLVEIDGVTIQV | | |
| | | | GSRQYPDVVYASKVILGPAISLERLDV | | |
| | | | GTNLGSALKKLNDAKVLIESSDQILDT | | |
| | | | VKNSYLSLGTLIALPVSIGLGLILLLLIC | | |
| | | | CCKKRYQHLFSQSTKVAPVFKPDLTG | | |
| | | | TSKSYVRSL | | |
| NC_028362 | 5217-6842 | gb:NC_ | MIKKIICIFSMPILLSFCQVDIIKLQRVG | 2 | 51 |
| | | 028362:5217- | ILVSKPKSIKISQNFETRYLVLNLIPNIE | | |
| | | 6842\| | NAQSCGDQQIKQYKKLLDRLIIPLYDG | | |
| | | Organism: | LRLQQDIIVVDNNLKNNTNHRAKRFF | | |
| | | Caprme | GEIIGTIALGVATSAQITAAVALVEAK | | |
| | | parainfluenza | QARSDIERVKNAVRDTNKAVQSIQGS | | |
| | | virus | VGNLIVAVKSVQDYVNNEIVPSIKRLG | | |
| | | 3\|Strain | CEAAGLQLGIALTQHYSELTNIFGDNI | | |
| | | Name:JS2013 | GTLKEKGIKLQGIASLYHTNITEIFTTS | | |
| | | \|Protein | TVDQYDIYDLLFTESIKMRVIDVDLND | | |
| | | Name: | YSITLQVRLPLLTKISDAQIYNVDSVS | | |
| | | fusion | YNIGGTEWYIPLPRNIMTKGAFLGGA | | |
| | | protein\| | NLQDCIESFSDYICPSDPGFILNRDIEN | | |
| | | Gene | CLSGNITQCPKTLVISDIVPRYAFVDG | | |
| | | Symbol:F | GVIANCLSTTCTCNGIDNRINQAPDQG | | |
| | | | IKIITYKDCQTIGINGMLFKTNQEGTLA | | |
| | | | AYTPVDITLNNSVNLDPIDLSIELNRA | | |
| | | | RSDLAESKEWIKRSEAKLDSVGSWYQ | | |
| | | | SSTTEIIQIVMIIVLFIINIIVLIVLIKYSRS | | |
| | | | QNQSMNNHMNEPYILTNKVQ | | |
| AF079780 | 5919-7580 | gb:AF079780\| | MASLLKTICYIYLITYAKLEPTPKSQL | 1 | 52 |
| | | Organism: | DLDSLASIGVVDAGKYNYKLMTTGSE | | |
| | | Tupaia | KLMVIKLVPNITYATNCNLTAHTAYT | | |
| | | paramyxo | KMIERLLTPINQSLYEMRSVITERDGG | | |
| | | virus\| | TIFWGAIIAGAALGVATAAAITAGVAL | | |
| | | Strain | HRAEQNARNIAALKDALRNSNEAIQH | | |
| | | Name:UN | LKDAQGHTVLAIQGLQEQINNNIIPKL | | |
| | | KNOWN- | KESHCLGVNNQLGLLLNQYYSEILTV | | |
| | | AF079780 | FGPNLQNPVSASLTIQAIAKAFNGDFN | | |
| | | \|Protein | SLMTNLNYDPTDLLDILESNSINGRIID | | |
| | | Name: | VNLNEKYIALSIEIPNFITLTDAKIQTFN | | |
| | | fusion | RITYGYGSNEWLTLIPDNILEYGNLISN | | |
| | | protein\| | VDLTSCVKTKSSYICNQDTSYPISSELT | | |
| | | Gene | RCLRGDTSSCPRTPVVNSRAPTFALSG | | |
| | | Symbol:F | GHIYANCAKAACRCEKPPMAIVQPAT | | |
| | | | STLTFLTEKECQEVVIDQINIQLAPNRL | | |
| | | | NKTIITDGIDLGPEVIINPIDVSAELGNI | | |
| | | | ELEMDKTQKALDRSNKILDSMITEVT | | |
| | | | PDKLLIAMIVVFGILLLWLFGVSYYAF | | |
| | | | KIWSKLHFLDSYVYSLRNPSHHRSNG | | |
| | | | HQNHSFSTDISG | | |
| EU403085 | 4664-6585 | gb:EU403085: | MQPGSALHLPHLYIIIALVSDGTLGQT | 1 | 53 |
| | | 4664- | AKIDRLIQAGIVLGSGKELHISQDSGTL | | |
| | | 6585\| | DLFVRLLPVLPSNLSHCQLEAITQYNK | | |
| | | Organism: | TVTRLLAPIGKNLEQVLQARPRGRLF | | |
| | | Avian | GPIIGSIALGVATSAQITAAIALVRAQQ | | |
| | | paramyxo | NANDILALKNALQSSNEAIRQLTYGQ | | |
| | | virus | DKQLLAISKIQKAVNEQILPALDQLDC | | |
| | | 3\|Strain | AVLGTKLAVQLNLYLIEMTTIFGEQIN | | |
| | | Name:APMV3/ | NPVLATIPLSYILRLTGAELNNVLMKQ | | |
| | | PKT/ | ARSSLSLVQLVSKGLLSGQVIGYDPSV | | |
| | | Netherland/ | QGLIIRVNLMRTQKIDRALVYQPYVLP | | |
| | | 449/75\| | ITLNSNIVTPIAPECVIQKGTIIEGMSRK | | |
| | | Protein | DCTELEQDIICRTVTTYTLARDTRLCL | | |
| | | Name: | QGNISSCRYQQSGTQLHTPFITYNGAV | | |
| | | ofusin | IANCDLVSCRCLRPPMIITQVKGYPLTI | | |
| | | protein\| | ITRSVCQELSVDNLVLNIETHHNFSLN | | |
| | | Gene | PTIIDPLTRVIATTPLEIDSLIQEAQDHA | | |
| | | Symbol:F | NAALAKVEESDKYLRAVTGGNYSNW | | |
| | | | YIVLVIVLLFGNLGWSLLLTVLLCRSR | | |
| | | | KQQRRYQQDDSVGSERGVGVGTIQY | | |
| | | | MS | | |
| KX258200 | 4443-6068 | gb:KX258 | MEKGTVLFLAALTLYNVKALDNTKL | 1 | 54 |
| | | 4443-200: | LGAGIASGKEHELKIYQSSVNGYIAVK | | |
| | | 6068\| | LIPFLPSTKRECYNEQLKNYNATINRL | | |
| | | Organism: | MGPINDNIKLVLSGVKTRTREGKLIGA | | |
| | | Avian | IIGTAALGLATAAQVTAAIALEQAQD | | |
| | | paramyxo | NARAILTLKESIRNTNNAVSELKTGLS | | |
| | | virus | EVSIALSKTQDYINTQIMPALSNLSCEI | | |
| | | 14\|Strain | VGLKIGIQLSQYLTEVTAVFGNQITNP | | |
| | | Name: | ALQPLSMQALYQLCGGDFSLLLDKIG | | |
| | | APMV14/duck/ | ADRNELESLYEANLVTGRIVQYDTAD | | |
| | | Japan/11OG0352/ | QLVIIQVSIPSVSTLSGYRVTELQSISV | | |
| | | 2011 | DMDHGEGKAVIPRYIVTSGRVIEEMDI | | |
| | | \|Protein | SPCVLTATAVYCNRLLTTSLPESVLKC | | |
| | | Name: | LDGDHSSCTYTSNSGVLETRYIAFDG | | |
| | | onfusi | MLIANCRSIVCKCLDPPYIIPQNKGKPL | | |
| | | protein\| | TIISKEVCKKVTLDGITLLIDAEFTGEY | | |
| | | Gene | GLNITIGPDQFAPSGALDISTELGKLNN | | |
| | | Symbol:F | SINKAEDYIDKSNELLNRVNVDIVNDT | | |
| | | | AVIVLCVMSALVVVWCIGLTVGLIYV | | |
| | | | SKNTLRAVAIKGTSIENPYVSSGKHAK | | |
| | | | NSS | | |
| KY511044 | 4592-6247 | gb:KY511044: | MIFTMYHVTVLLLLSLLTLPLGIQLAR | 1 | 55 |
| | | 4592- | ASIDGRQLAAAGIVVTGEKAINLYTSS | | |
| | | 6247\| | QTGTIVVKLLPNVPQGREACMRDPLT | | |
| | | Organism: | SYNKTLTSLLSPLGEAIRRIHESTTETA | | |
| | | Avian | GLVQARLVGAIIGSVALGVATSAQITA | | |
| | | paramyxo | AAALIQANKNAENILKLKQSIAATNE | | |
| | | virus | AVHEVTDGLSQLAVAVGKMQDFINT | | |
| | | UPO216\| | QFNNTAQEIDCIRISQQLGVELNLYLT | | |
| | | Strain | ELTTVFGPQITSPALSPLSIQALYNLAG | | |
| | | Name:AP | GNLDVLLSKIGVGNNQLSALISSGLIS | | |
| | | MV- | GSPILYDSQTQLLGIQVTLPSVSSLNN | | |
| | | 15/WB/Kr/ | MRAIFLETLSVSTDKGFAAALIPKVVT | | |
| | | UPO216/ | TVGTVTEELDTSYCIETDIDLFCTRIVT | | |
| | | 2014\| | FPMSPGIYACLNGNTSECMYSKTQGA | | |
| | | Protein | LTTPYMSVKGSIVANCKMTTCRCADP | | |
| | | Name: | ASIISQNYGEAVSLIDSSVCRVITLDGV | | |
| | | ofusin | TLRLSGSFDSTYQKNITIRDSQVIITGS | | |
| | | protein\| | LDISTELGNVNNSINNALDKIEESNQIL | | |
| | | Gene | ESVNVSLTSTNALIVYIICTALALICGIT | | |
| | | Symbol:F | GLILSCYIMYKMRSQQKTLMWLGNN | | |
| | | | TLDQMRAQTKM | | |
| NC_025360 | 6104-8123 | gb:NC_ | MDGPKFRFVLLILLTAPARGQVDYDK | 1 | 56 |
| | | 025360:6104- | LLKVGIFEKGTANLKISVSSQQRYMVI | | |
| | | 8123\| | KMMPNLGPMNQCGIKEVNLYKESILR | | |
| | | Orga | LITPISTTLNYIKSEIQVEREVALQPNG | | |
| | | nism: | TIVRFFGLIVAAGALTLATSAQITAGIA | | |
| | | Atlantic | LHNSLENAKAIKGLTDAIKESNLAIQK | | |
| | | salmon | IQDATAGTVIALNALQDQVNTNIIPAI | | |
| | | paramyxo | NTLGCTAAGNTLGIALTRYYSELIMIF | | |
| | | virus\| | GPSLGNPVEAPLTIQALAGAFNGDLH | | |
| | | Strain | GMIREYGYTPSDIEDILRTNSVTGRVI | | |
| | | Name: | DVDLVGMNIVLEINLPTLYTLRDTKIV | | |
| | | ASPV/Yrkje371/ | NLGKITYNVDGSEWQTLVPEWLAIRN | | |
| | | 95\| | TLMGGVDLSRCVVSSRDLICKQDPVF | | |
| | | Protein | SLDTSIISCLNGNTESCPRNRVVNSVA | | |
| | | Name: | PRYAVIRGNILANCISTTCLCGDPGVPI | | |
| | | ofusin | IQKGDNTLTAMSINDCKLVGVDGYVF | | |
| | | protein\| | RPGPKAVNVTFNLPHLNLGPEVNVNP | | |
| | | Gene | VDISGALGKVEQDLASSRDHLAKSEKI | | |
| | | Symbol:F | LSGINPNIINTEMVLVAVILSLVCAMV | | |
| | | | VIGIVCWLSILTKWVRSCRADCRRPN | | |
| | | | KGPDLGPIMSSQDNLSF | | |
| UniProt | | FUS_NIP | MVVILDKRCYCNLLILILMISECSVGIL | | 57 |
| ID: | | AV | HYEKLSKIGLVKGVTRKYKIKSNPLT | | |
| Q9IH63 | | Fusion | KDIVIKMIPNVSNMSQCTGSVMENYK | | |
| | | glycoprotein | TRLNGILTPIKGALEIYKNNTHDLVGD | | |
| | | F0 | VRLAGVIMAGVAIGIATAAQITAGVA | | |
| | | OS = Nipah | LYEAMKNADNINKLKSSIESTNEAVV | | |
| | | virus | KLQETAEKTVYVLTALQDYINTNLVP | | |
| | | | TIDKISCKQTELSLDLALSKYLSDLLFV | | |
| | | | FGPNLQDPVSNSMTIQAISQAFGGNYE | | |
| | | | TLLRTLGYATEDFDDLLESDSITGQIIY | | |
| | | | VDLSSYYIIVRVYFPILTEIQQAYIQEL | | |
| | | | LPVSFNNDNSEWISIVPNFILVRNTLIS | | |
| | | | NIEIGFCLITKRSVICNQDYATPMTNN | | |
| | | | MRECLTGSTEKCPRELVVSSHVPRFA | | |
| | | | LSNGVLFANCISVTCQCQTTGRAISQS | | |
| | | | GEQTLLMIDNTTCPTAVLGNVIISLGK | | |
| | | | YLGSVNYNSEGIAIGPPVFTDKVDISS | | |
| | | | QISSMNQSLQQSKDYIKEAQRLLDTV | | |
| | | | NPSLISMLSMIILYVLSIASLCIGLITFIS | | |
| | | | FIIVEKKRNTYSRLEDRRVRPTSSGDL | | |
| | | | YYIGT | | |

[0512] In some embodiments, a fusogen described herein comprises an amino acid sequence of Table 2, or an amino acid sequence having at least 80%, 85%, 90%, 95%, 96%, 97%, 98%, or 99% sequence identity thereto, or an amino acid sequence having at least 80%, 85%, 90%, 95%, 96%, 97%, 98%, or 99% sequence identity to a portion of the sequence, e.g., a portion of 100, 200, 300, 400, 500, or 600 amino acids in length. For instance, in some embodiments, a fusogen described herein comprises an amino acid sequence having at least 80% identity to any amino acid sequence of Table 2. In some embodiments, a nucleic acid sequence described herein encodes an amino acid sequence of Table 2, or an amino acid sequence having at least 80%, 85%, 90%, 95%, 96%, 97%, 98%, or 99% sequence identity thereto, or an amino acid sequence having at least 80%, 85%, 90%, 95%, 96%, 97%, 98%, or 99% sequence identity to a portion of the sequence, e.g., a portion of 40, 50, 60, 80, 100, 200, 300, 400, 500, or 600 amino acids in length.

[0513] In some embodiments, a fusogen described herein comprises an amino acid sequence set forth in any one of SEQ ID NOS: 58-133, or an amino acid sequence having at least 80%, 85%, 90%, 95%, 96%, 97%, 98%, or 99% sequence identity thereto, or an amino acid sequence having at least 80%, 85%, 90%, 95%, 96%, 97%, 98%, or 99% sequence identity to a portion of the sequence, e.g., a portion of 100, 200, 300, 400, 500, or 600 amino acids in length. For instance, in some embodiments, a fusogen described herein comprises an amino acid sequence having at least 80% identity to an amino acid sequence set forth in any one of SEQ ID NOS: 58-133. In some embodiments, a nucleic acid sequence described herein encodes an amino acid sequence set forth in any one of SEQ ID NOS: 58-133, or an amino acid sequence having at least 80%, 85%, 90%, 95%, 96%, 97%, 98%, or 99% sequence identity thereto, or an amino acid sequence having at least 80%, 85%, 90%, 95%, 96%, 97%, 98%, or 99% sequence identity to a portion of the sequence, e.g., a portion of 40, 50, 60, 80, 100, 200, 300, 400, 500, or 600 amino acids in length.

TABLE 2
Paramyxovirus protein G, H, and HN sequence clusters. Column 1, Genbank ID
includes the Genbank ID of the whole genome sequence of the virus that is the centroid sequence
of the cluster. Column 2, nucleotides of CDS provides the nucleotides corresponding to the CDS
of the gene in the whole genome. Column 3, Full Gene Name, provides the full name of the
gene including Genbank ID, virus species, strain, and protein name. Column 4, Sequence,
provides the amino acid sequence of the gene. Column 5, #Sequences/Cluster, provides the
number of sequences that cluster with this centroid sequence.

| Genbank | Nucleotides | Full sequence | | #Sequences/ | SEQ ID |
|---|---|---|---|---|---|
| ID | of CDS | ID | Sequence | Cluster | NO |
| KU950686 | 4643-5638 | gb:KU950686: | MSKTKDQRTAKTLERTWDTLNHLLFISSC | 706 | 58 |
| | | 4643- | LYKLNLKSIAQITLSILAMIISTSLIIAAIIFIA | | |
| | | 5638\|Organism: | SANHKVTLTTAIIQDATNQIKNTTPTYLTQ | | |
| | | Human | NPQLGISFSNLSGTTLQSTTILASTTPSAEST | | |
| | | respiratory | PQSTTVKIINTTTTQILPSKPTTKQRQNKPQ | | |
| | | syncytial | NKPNNDFHFEVFNFVPCSICSNNPTCWAIC | | |
| | | virus\|Strain | KRIPNKKPGKKTTTKPTKKPTLKTTKKDP | | |
| | | Name:RSV A/ | KPQTTKPKEALTTKPTGKPTINTTKTNIRTT | | |
| | | Homo | LLTSNTKGNPEHTSQEETLHSTTSEGYLSP | | |
| | | sapiens/USA/ | SQVYTTSGQEETLHSTTSEGYLSPSQVYTT | | |
| | | TH_10506/2014\| | SEYLSQSLSSSNTTK | | |
| | | Protein | | | |
| | | Name: | | | |
| | | attachment | | | |
| | | glycoprotein\| | | | |
| | | Gene Symbol:G | | | |
| ABS24405 | 6424-8274 | gb:AB524405: | MERGVSQVALENDEREAKNTWRLVFRVT | 418 | 59 |
| | | 6424- | VLFLTIVTLAISAAALAFSMNASTPQDLEGI | | |
| | | 8274\|Organism: | PVAISKVEDKITSALGASQDVMDRIYKQV | | |
| | | Newcastle | ALESPLALLNTESTIMNALTSLSYQINGAA | | |
| | | disease | NASGCGAPVPDPDYIGGIGKELIVDDTSDV | | |
| | | virus\|Strain | TSFYPSAFQEHLNFIPAPTTGSGCTRIPSFD | | |
| | | Name:Goose/ | MSATHYCYTHNVILSGCRDHSHSHQYLAL | | |
| | | Alaska/415/91\| | GVLRTSATGRVFFSTLRSINLDDTQNRKSC | | |
| | | Protein | SVSATPLGCDMLCSKVTETEEEDYQSTDP | | |
| | | Name: | TLMVHGRLGFDGQYHERDLDVHTLFGDW | | |
| | | hemagglutinin- | VANYPGVGGGSFINNRVWFPVYGGLKPGS | | |
| | | neuraminidase | PTDKRQEGQYAIYKRYNDTCPDDQEYQV | | |
| | | protein\|Gene | RMAKSAYKPNRFGGKRVQQAILSIGVSTT | | |
| | | Symbol:HN | LADDPVLTVTSNTITLMGAEGRVMTVGTS | | |
| | | | HYLYQRGSSYYSPAILYPLTIANKTATLQD | | |
| | | | PYKFNAFTRPGSVPCQASARCPNSCVTGV | | |
| | | | YTDPYPIVFHKNHTLRGVFGTMLDDEQAR | | |
| | | | LNPVSAVFDSIARSRVTRVSSSSTKAAYTT | | |
| | | | STCFKVVKTGKVYCLSIAEISNTLFGEFRIV | | |
| | | | PLLVEILRDEGRSEARSALTTQGHPGWND | | |
| | | | EVVDPIFCAVTNQTDHRQKLEEYAQSWP | | |
| JQ582844 | 4686-5636 | gb:JQ582844: | MSKNKNQRTARTLEKTWDTLNHLIVISSC | 278 | 60 |
| | | 4686- | LYKLNLKSIAQIALSVLAMIISTSLIIAAIIFII | | |
| | | 5636\|Organism: | SANHKVTLTTVTVQTIKNHTEKNITTYLTQ | | |
| | | Human | VSPERVSPSKQPTTTPPIHTNSATISPNTKSE | | |
| | | respiratory | THHTTAQTKGRTTTPTQNNKPSTKPRPKN | | |
| | | syncytial | PPKKPKDDYHFEVFNFVPCSICGNNQLCKS | | |
| | | virus\|Strain | ICKTIPNNKPKKKPTTKPTNKPPTKTTNKR | | |
| | | Name:NH1067\| | DPKTPAKTLKKETTINPTTKKPTPKTTERD | | |
| | | Protein | TSTPQSTVLDTTTSKHTERDTSTPQSTVLD | | |
| | | Name:receptor- | TTTSKHTIQQQSLHSITPENTPNSTQTPTAS | | |
| | | binding | EPSTSNSTQKL | | |
| | | glycoprotein\| | | | |
| | | Gene Symbol:G | | | |
| AB254456 | 7271-9136 | gb:AB254456: | MSPHRDRINAFYRDNPHPKGSRIVINREHL | 128 | 61 |
| | | 7271- | MIDRPYVLLAVLFVMFLSLIGLLAIAGIRL | | |
| | | 9136\|Organism: | HRAAIYTAEIHKSLSTNLDVTNSIEHQVKD | | |
| | | Measles | VLTPLFKIIGDEVGLRTPQRFTDLVKFISDK | | |
| | | virus\|Strain | IKFLNPDREYDFRDLTWCINPPERIKLDYD | | |
| | | Name:SSPE- | QYCADVAAEELMNALVNSTLLEARATNQ | | |
| | | Kobe-1\|Protein | FLAVSKGNCSGPTTIRGQFSNMSLSLLDLY | | |
| | | Name: | LSRGYNVSSIVTMTSQGMYGGTYLVGKPN | | |
| | | Hemagglutinin\|Gene | LSSKGSELSQLSMHRVFEVGVIRNPGLGAP | | |
| | | Symbol:H | VFHMTNYFEQPVSNDFSNCMVALGELRFA | | |
| | | | ALCHREDSVTVPYQGSGKGVSFQLVKLGV | | |
| | | | WKSPTDMQSWVPLSTDDPVIDRLYLSSHR | | |
| | | | GVIADNQAKWAVPTTRTDDKLRMETCFQ | | |
| | | | QACKGKNQALCENPEWAPLKDNRIPSYG | | |
| | | | VLSVNLSLTVELKIKIASGFGPLITHGSGM | | |
| | | | DLYKTNHDNVYWLTIPPMKNLALGVINTL | | |
| | | | EWIPRFKVSPNLFTVPIKEAGEDCHAPTYL | | |
| | | | PAEVDGDVKLSSNLVILPGQDLQYVLATY | | |
| | | | DTSRVEHAVVYYVYSPSRSFSYFYPFRLPI | | |
| | | | KGVPIELQVECFTWDQKLWCRHFCVLADS | | |
| | | | ESGGHITHSGMVGMGVSCTVTREDGTNR | | |
| | | | RQGCQ | | |
| AB040874 | 6614- | gb:AB040874: | MEPSKLFTMSDNATFAPGPVINAADKKTF | 87 | 62 |
| | 8362 | 6614- | RTCFRILVLSVQAVTLILVIVTLGELVRMIN | | |
| | | 8362\|Organism: | DQGLSNQLSSIADKIRESATMIASAVGVM | | |
| | | Mumps | NQVIHGVTVSLPLQIEGNQNQLLSTLATIC | | |
| | | virus\|Strain | TGKKQVSNCSTNIPLVNDLRFINGINKFIIE | | |
| | | Name:Miyahara | DYATHDFSIGHPLNMPSFIPTATSPNGCTRI | | |
| | | \|Protein | PSFSLGKTHWCYTHNVINANCKDHTSSNQ | | |
| | | Name: | YISMGILVQTASGYPMFKTLKIQYLSDGLN | | |
| | | hemagglutinin- | RKSCSIATVPDGCAMYCYVSTQLETDDYA | | |
| | | neuraminidase\| | GSSPPTQKLTLLFYNDTVTERTISPTGLEGN | | |
| | | Gene | WATLVPGVGSGIYFENKLIFPAYGGVLPNS | | |
| | | Symbol:HN | SLGVKSAREFFRPVNPYNPCSGPQQDLDQ | | |
| | | | RALRSYFPSYFSNRRVQSAFLVCAWNQIL | | |
| | | | VTNCELVVPSNNQTLMGAEGRVLLINNRL | | |
| | | | LYYQRSTSWWPYELLYEISFTFTNSGQSSV | | |
| | | | NMSWIPIYSFTRPGSGNCSGENVCPTACVS | | |
| | | | GVYLDPWPLTPYSHQSGINRNFYFTGALL | | |
| | | | NSSTTRVNPTLYVSALNNLKVLAPYGNQG | | |
| | | | LFASYTTTTCFQDTGDASVYCVYIMELAS | | |
| | | | NIVGEFQILPVLTRLTIT | | |
| AB736166 | 6709-8427 | gb:AB736166: | MEYWKHTNHGKDAGNELETATATHGNR | 78 | 63 |
| | | 6709- | LTNKITYILWTITLVLLSIVFIIVLINSIKSEK | | |
| | | 8427\|Organism: | AHESLLQDINNEFMEVTEKIQVASDNTND | | |
| | | Human | LIQSGVNTRLLTIQSHVQNYIPISLTQQISDL | | |
| | | respirovirus | RKFISEITIRNDNQEVPPQRITHDVGIKPLNP | | |
| | | 3\|Strain | DDFWRCTSGLPSLMRTPKIRLMPGPGLLA | | |
| | | Name:ZMLS/ | MPTTVDGCVRTPSLVINDLIYAYTSNLITR | | |
| | | 2011\|Protein | GCQDIGKSYQVLQIGIITVNSDLVPDLNPRI | | |
| | | Name: | SHTFNINDNRKSCSLALLNTDVYQLCSTPK | | |
| | | hemagglutinin- | VDERSDYASSGIEDIVLDIVNYDGSISTTRF | | |
| | | neuraminidase\| | KNNNISFDQPYAALYPSVGPGIYYKGKIIFL | | |
| | | Gene | GYGGLEHPINENAICNTTGCPGKTQRDCN | | |
| | | Symbol:HN | QASHSPWFSDRRMVNSIIVVDKGLNSVPK | | |
| | | | LKVWTISMRQNYWGSEGRLLLLGNKIYIY | | |
| | | | TRSTSWHSKLQLGIIDITDYSDIRIKWTWH | | |
| | | | NVLSRPGNNECPWGHSCPDGCITGVYTDA | | |
| | | | YPLNPTGSIVSSVILDSQKSRVNPVITYSTA | | |
| | | | TERVNELAIRNKTLSAGYTTTSCITHYNKG | | |
| | | | YCFHIVEINHKSLNTFQPMLFKTEIPKSCS | | |
| KJ627396 | 6166-6885 | gb:KJ627396: | MEVKVENIRAIDMLKARVKNRVARSKCF | 71 | 64 |
| | | 6166- | KNASLILIGITTLSIALNIYLIINYTIQKTTSE | | |
| | | 6885\|Organism: | SEHHTSSPPTESNKETSTIPIDNPDITPNSQH | | |
| | | Human | PTQQSTESLTLYPASSMSPSETEPASTPGIT | | |
| | | metapneumovirus | NRLSLADRSTTQPSESRTKTNSTVHKKNK | | |
| | | \|Strain | KNISSTISRTQSPPRTTAKAVSRTTALRMSS | | |
| | | Name:HMPV/ | TGERPTTTSVQSDSSTTAQNHEETGPANPQ | | |
| | | Homo | ASVSTM | | |
| | | sapiens/PER/ | | | |
| | | FLI1305/2010/A | | | |
| | | \|Protein | | | |
| | | Name: | | | |
| | | attachment | | | |
| | | glycoprotein | | | |
| | | G\|Gene | | | |
| | | Symbol:G | | | |
| AB475097 | 7079-8902 | gb:AB475097: | MLSYQDKVGAFYKDNARANSSKLSLVTE | 45 | 65 |
| | | 7079- | EQGGRRPPYLLFVLLILLVGILALLAIAGVR | | |
| | | 8902\|Organism: | FRQVSTSNVEFGRLLKDDLEKSEAVHHQV | | |
| | | Canine | MDVLTPLFKIIGDEIGLRLPQKLNEIKQFIL | | |
| | | distemper | QKTNFFNPNREFDFRDLHWCINPPSKIKVN | | |
| | | virus\|Strain | FTNYCDAIGVRKSIASAANPILLSALSGGR | | |
| | | Name:M25CR\| | GDIFPPYRCSGATTSVGRVFPLSVSLSMSLI | | |
| | | Protein | SKTSEIISMLTAISDGVYGKTYLLVPDYIER | | |
| | | Name: | EFDTQKIRVFEIGFIKRWLNDMPLLQTTNY | | |
| | | hemagglutinin\|Gene | MVLPENSKAKVCTIAVGELTLASLCVDES | | |
| | | Symbol:H | TVLLYHDSNGSQDSILVVTLGIFGATPMNQ | | |
| | | | VEEVIPVAHPSVERIHITNHRGFIKDSVAT | | |
| | | | WMVPALVSEQQEGQKNCLESACQRKSYP | | |
| | | | MCNQTSWEPFGGVQLPSYGRLTLPLDASI | | |
| | | | DLQLNISFTYGPVILNGDGMDYYENPLLDS | | |
| | | | GWLTIPPKNGTILGLINKASRGDQFTVTPH | | |
| | | | VLTFAPRESSGNCYLPIQTSQIMDKDVLTE | | |
| | | | SNLVVLPTQNFRYVVATYDISRENHAIVY | | |
| | | | YVYDPIRTISYTYPFRLTTKGRPDFLRIECF | | |
| | | | VWDDDLWCHQFYRFESDITNSTTSVEDLV | | |
| | | | RIRFSCNRSKP | | |
| AJ849636 | 7326-9155 | gb:AJ849636: | MSAQRERINAFYKDNPHNKNHRVILDRER | 34 | 66 |
| | | 7326- | LVIERPYILLGVLLVMFLSLIGLLAIAGIRL | | |
| | | 9155\|Organism: | HRATVGTSEIQSRLNTNIELTESIDHQTKD | | |
| | | Peste-des- | VLTPLFKIIGDEVGIRIPQKFSDLVKFISDKI | | |
| | | petits- | KFLNPDREYDFRDLRWCMNPPERVKINFD | | |
| | | ruminants | QFCEYKAAVKSIEHIFESPLNKSKKLQSLT | | |
| | | virus\|Strain | LGPGTGCLGRTVTRAHFSELTLTLMDLDL | | |
| | | Name:Turkey | EMKHNVSSVFTVVEEGLFGRTYTVWRSD | | |
| | | 2000\|Protein | ARDPSTDLGIGHFLRVFEIGLVRDLGLGPP | | |
| | | Name: | VFHMTNYLTVNMSDDYRRCLLAVGELKL | | |
| | | haemagglutinin\| | TALCSSSETVTLGERGVPKREPLVVVILNL | | |
| | | Gene | AGPTLGGELYSVLPTSDLMVEKLYLSSHR | | |
| | | Symbol:H | GIIKDDEANWVVPSTDVRDLQNKGECLVE | | |
| | | | ACKTRPPSFCNGTGSGPWSEGRIPAYGVIR | | |
| | | | VSLDLASDPGVVITSVFGPLIPHLSGMDLY | | |
| | | | NNPFSRAVWLAVPPYEQSFLGMINTIGFPN | | |
| | | | RAEVMPHILTTEIRGPRGRCHVPIELSRRV | | |
| | | | DDDIKIGSNMVILPTIDLRYITATYDVSRSE | | |
| | | | HAIVYYIYDTGRSSSYFYPVRLNFKGNPLS | | |
| | | | LRIECFPWRHKVWCYHDCLIYNTITDEEV | | |
| | | | HTRGLTGIEVTCNPV | | |
| AB005795 | 6693-8420 | gb:AB005795: | MDGDRSKRDSYWSTSPGGSTTKLVSDSER | 23 | 67 |
| | | 6693- | SGKVDTWLLILAFTQWALSIATVIICIVIAA | | |
| | | 8420\|Organism: | RQGYSMERYSMTVEALNTSNKEVKESLTS | | |
| | | Sendai | LIRQEVITRAANIQSSVQTGIPVLLNKNSRD | | |
| | | virus\|Strain | VIRLIEKSCNRQELTQLCDSTIAVHHAEGIA | | |
| | | Name:Ohita\| | PLEPHSFWRCPAGEPYLSSDPEVSLLPGPSL | | |
| | | Protein | LSGSTTISGCVRLPSLSIGEAIYAYSSNLITQ | | |
| | | Name: | GCADIGKSYQVLQLGYISLNSDMFPDLNP | | |
| | | hemagglutinin- | VVSHTYDINDNRKSCSVVATGTRGYQLCS | | |
| | | neuraminidase | MPIVDERTDYSSDGIEDLVLDILDLKGRTK | | |
| | | protein\|Gene | SHRYSNSEIDLDHPFSALYPSVGSGIATEGS | | |
| | | Symbol:HN | LIFLGYGGLTTPLQGDTKCRIQGCQQVSQD | | |
| | | | TCNEALKITWLGGKQVVSVLIQVNDYLSE | | |
| | | | RPRIRVTTIPITQNYLGAEGRLLKLGDQVYI | | |
| | | | YTRSSGWHSQLQIGVLDVSHPLTISWTPHE | | |
| | | | ALSRPGNEDCNWYNTCPKECISGVYTDAY | | |
| | | | PLSPDAANVATVTLYANTSRVNPTIMYSN | | |
| | | | TTNIINMLRIKDVQLEAAYTTTSCITHFGK | | |
| | | | GYCFHIIEINQKSLNTLQPMLFKTSIPKLCK | | |
| | | | AES | | |
| AF457102 | 6903-8630 | gb:AF457102\| | MAEKGKTNSSYWSTTRNDNSTVNTHINTP | 21 | 68 |
| | | Organism: | AGRTHIWLLIATTMHTVLSFIIMILCIDLIIK | | |
| | | Human | QDTCMKTNIMTVSSMNESAKIIKETITELIR | | |
| | | parainfluenza | QEVISRTINIQSSVQSGIPILLNKQSRDLTQL | | |
| | | virus 1 strain | IEKSCNRQELAQICENTIAIHHADGISPLDP | | |
| | | Washington/1964 | HDFWRCPVGEPLLSNNPNISLLPGPSLLSG | | |
| | | \|Strain | STTISGCVRLPSLSIGDAIYAYSSNLITQGC | | |
| | | Name: | ADIGKSYQVLQLGYISLNSDMYPDLNPVIS | | |
| | | Washington | HTYDINDNRKSCSVIAAGTRGYQLCSLPTV | | |
| | | 1964\|Protein | NETTDYSSEGIEDLVFDILDLKGKTKSHRY | | |
| | | Name:HN | KNEDITFDHPFSAMYPSVGSGIKIENTLIFL | | |
| | | glycoprotein\| | GYGGLTTPLQGDTKCVINRCTNVNQSVCN | | |
| | | Gene | DALKITWLKKRQVVNVLIRINNYLSDRPKI | | |
| | | Symbol:HN | VVETIPITQNYLGAEGRLLKLGKKIYIYTRS | | |
| | | | SGWHSNLQIGSLDINNPMTIKWAPHEVLS | | |
| | | | RPGNQDCNWYNRCPRECISGVYTDAYPLS | | |
| | | | PDAVNVATTTLYANTSRVNPTIMYSNTSEI | | |
| | | | INMLRLKNVQLEAAYTTTSCITHFGKGYC | | |
| | | | FHIVEINQASLNTLQPMLFKTSIPKICKITS | | |
| KJ627397 | 6146-6888 | gb:KJ627397: | MEVRVENIRAIDMFKAKMKNRIRSSKCYR | 21 | 69 |
| | | 6146- | NATLILIGLTALSMALNIFLIIDYATLKNMT | | |
| | | 6888\|Organism: | KVEHCVNMPPVEPSKKSPMTSAADLNTKL | | |
| | | Human | NPQQATQLTTEDSTSLAATSENHLHTETTP | | |
| | | metapneumovirus | TSDATISQQATDEHTTLLRPINRQTTQTTTE | | |
| | | \|Strain | KKPTGATTKKDKEKETTTRTTSTAATQTL | | |
| | | Name:HMPV/ | NTTNQTSNGREATTTSARSRNGATTQNSD | | |
| | | Homo | QTIQAADPSSKPYHTQTNTTTAHNTDTSSL | | |
| | | I/PER/ | SS | | |
| | | FPP00098/2010/ | | | |
| | | B\|Protein | | | |
| | | Name: | | | |
| | | attachment | | | |
| | | glycoprotein | | | |
| | | G\|Gene | | | |
| | | Symbol:G | | | |
| AF017149 | 8913-10727 | gb:AF017149\| | MMADSKLVSLNNNLSGKIKDQGKVIKNY | 14 | 70 |
| | | Organism:Hendra | YGTMDIKKINDGLLDSKILGAFNTVIALLG | | |
| | | virus\|Strain | SIIIIVMNIMIIQNYTRTTDNQALIKESLQSV | | |
| | | Name: | QQQIKALTDKIGTEIGPKVSLIDTSSTITIPA | | |
| | | UNKNOWN- | NIGLLGSKISQSTSSINENVNDKCKFTLPPL | | |
| | | AF017149\| | KIHECNISCPNPLPFREYRPISQGVSDLVGL | | |
| | | Protein | PNQICLQKTTSTILKPRLISYTLPINTREGVC | | |
| | | Name: | ITDPLLAVDNGFFAYSHLEKIGSCTRGIAK | | |
| | | glycoprotein\|Gene | QRIIGVGEVLDRGDKVPSMFMTNVWTPPN | | |
| | | Symbol:G | PSTIHHCSSTYHEDFYYTLCAVSHVGDPIL | | |
| | | | NSTSWTESLSLIRLAVRPKSDSGDYNQKYI | | |
| | | | AITKVERGKYDKVMPYGPSGIKQGDTLYF | | |
| | | | PAVGFLPRTEFQYNDSNCPIIHCKYSKAEN | | |
| | | | CRLSMGVNSKSHYILRSGLLKYNLSLGGDI | | |
| | | | ILQFIEIADNRLTIGSPSKIYNSLGQPVFYQA | | |
| | | | SYSWDTMIKLGDVDTVDPLRVQWRNNSV | | |
| | | | ISRPGQSQCPRFNVCPEVCWEGTYNDAFLI | | |
| | | | DRLNWVSAGVYLNSNQTAENPVFAVFKD | | |
| | | | NEILYQVPLAEDDTNAQKTITDCFLLENVI | | |
| | | | WCISLVEIYDTGDSVIRPKLFAVKIPAQCSE | | |
| | | | S | | |
| AF212302 | 8943-10751 | gb:AF212302\| | MPAENKKVRFENTTSDKGKIPSKVIKSYY | 14 | 71 |
| | | Organism:Nipah | GTMDIKKINEGLLDSKILSAFNTVIALLGSI | | |
| | | virus\|Strain | VIIVMNIMIIQNYTRSTDNQAVIKDALQGIQ | | |
| | | Name: | QQIKGLADKIGTEIGPKVSLIDTSSTITIPAN | | |
| | | UNKNOWN- | IGLLGSKISQSTASINENVNEKCKFTLPPLKI | | |
| | | AF212302\| | HECNISCPNPLPFREYRPQTEGVSNLVGLP | | |
| | | Protein | NNICLQKTSNQILKPKLISYTLPVVGQSGT | | |
| | | Name: | CITDPLLAMDEGYFAYSHLERIGSCSRGVS | | |
| | | attachment | KQRIIGVGEVLDRGDEVPSLFMTNVWTPP | | |
| | | glycoprotein\| | NPNTVYHCSAVYNNEFYYVLCAVSTVGD | | |
| | | Gene Symbol:G | PILNSTYWSGSLMMTRLAVKPKSNGGGY | | |
| | | | NQHQLALRSIEKGRYDKVMPYGPSGIKQG | | |
| | | | DTLYFPAVGFLVRTEFKYNDSNCPITKCQY | | |
| | | | SKPENCRLSMGIRPNSHYILRSGLLKYNLS | | |
| | | | DGENPKVVFIEISDQRLSIGSPSKIYDSLGQ | | |
| | | | PVFYQASFSWDTMIKFGDVLTVNPLVVN | | |
| | | | WRNNTVISRPGQSQCPRFNTCPEICWEGV | | |
| | | | YNDAFLIDRINWISAGVFLDSNQTAENPVF | | |
| | | | TVFKDNEILYRAQLASEDTNAQKTITNCFL | | |
| | | | LKNKIWCISLVEIYDTGDNVIRPKLFAVKIP | | |
| | | | EQCT | | |
| EU439428 | 6751-8638 | gb:EU439428: | MEYWKHTNSTKDTNNELGTTRDRHSSKA | 14 | 72 |
| | | 6751- | TNIIMYIFWTTTSTILSVIFIMILINLIQENNH | | |
| | | 8638\|Organism: | NKLMLQEIKKEFAVIDTKIQKTSDDISTSIQ | | |
| | | Swine | SGINTRLLTIQSHVQNYIPLSLTQQMSDLR | | |
| | | parainfluenza | KFINDLTTKREHQEVPIQRMTHDSGIEPLN | | |
| | | virus 3\|Strain | PDKFWRCTSGNPSLTSSPKIRLIPGPGLLAT | | |
| | | Name:92- | STTVNGCIRIPSLAINNLIYAYTSNLITQGC | | |
| | | 7783_ISU- | QDIGKSYQVLQIGIITINSDLVPDLNPRVTH | | |
| | | 92\|Protein | TFNIDDNRKSCSLALLNTDVYQLCSTPKV | | |
| | | Name: | DERSDYASTGIEDIVLDIVTSNGLIITTRFTN | | |
| | | hemagglutinin- | NNITFDKPYAALYPSVGPGIYYKDKVIFLG | | |
| | | neuraminidase | YGGLEHEENGDVICNTTGCPGKTQRDCNQ | | |
| | | HN\|Gene | ASYSPWFSNRRMVNSIIVVDKSIDTTFSLR | | |
| | | Symbol:HN | VWTIPMRQNYWGSEGRLLLLGDRIYIYTR | | |
| | | | STSWHSKLQLGVIDISDYNNIRINWTWHN | | |
| | | | VLSRPGNDECPWGHSCPDGCITGVYTDAY | | |
| | | | PLNPSGSVVSSVILDSQKSRENPIITYSTAT | | |
| | | | NRVNELAIYNRTLPAAYTTTNCITHYDKG | | |
| | | | YCFHIVEINHRSLNTFQPMLFKTEVPKNCS | | |
| KF530164 | 6157-6906 | gb:KF530164: | MEVRVENIRAIDMFKAKIKNRIRSSRCYRN | 14 | 73 |
| | | 6157- | ATLILIGLTALSMALNIFLIIDHATLRNMIK | | |
| | | 6906\|Organism: | TENCANMPSAEPSKKTPMTSTAGPSTKPN | | |
| | | Human | PQQATQWTTENSTSPAATLEGHPYTGTTQ | | |
| | | metapneumovirus | TPDTTAPQQTTDKHTALPKSTNEQITQTTT | | |
| | | \|Strain | EKKTTRATTQKREKRKENTNQTTSTAATQ | | |
| | | Name:HMPV/ | TTNTTNQTRNASETITTSDGPRIDTTTQSSE | | |
| | | AUS/172832788/ | QTARATEPGSSPYHARRGAGPR | | |
| | | 2004/B\| | | | |
| | | Protein | | | |
| | | Name: | | | |
| | | attachment | | | |
| | | glycoprotein | | | |
| | | G\|Gene | | | |
| | | Symbol:G | | | |
| AB910309 | 6960-8747 | gb:AB910309: | MKNINIKYYKDSNRYLGKILDEHKIVNSQL | 12 | 74 |
| | | 6960- | YSLSIKVITIIAIIVSLIATIMTIINATSGRTTL | | |
| | | 8747\|Organism: | NSNTDILLNQRDEIHSIHEMIFDRVYPLITA | | |
| | | Feline | MSTELGLHIPTLLDELTKAIDQKIKIMNPPV | | |
| | | morbillivirus\| | DTVTSDLSWCIKPPNGIIIDPKGYCESMELS | | |
| | | Strain | KTYKLLLDQLDVSRKKSLTINRKNINQCQ | | |
| | | Name:SS1\| | LVDDSEIIFATVNIQSTPRFLNFGHTVSNQR | | |
| | | Protein | ITFGQGTYSSTYILTIQEDGITDVQYRVFEI | | |
| | | Name: | GYISDQFGVFPSLIVSRVLPIRMVLGMESC | | |
| | | hemagglutinin | TLTSDRQGGYFLCMNTLTRSIYDYVNIRDL | | |
| | | protein\|Gene | KSLYITLPHYGKVNYTYFNFGKIRSPHEID | | |
| | | Symbol:H | KLWLTSDRGQIISGYFAAFVTITIRNYNNY | | |
| | | | PYKCLNNPCFDNSENYCRGWYKNITGTDD | | |
| | | | VPILAYLLVEMYDEEGPLITLVAIPPYNYT | | |
| | | | APSHNSLYYDDKINKLIMTTSHIGYIQINEV | | |
| | | | HEVIVGDNLKAILLNRLSDEHPNLTACRLN | | |
| | | | QGIKEQYKSDGMIISNSALIDIQERMYITVK | | |
| | | | AIPPVGNYNFTVELHSRSNTSYILLPKQFN | | |
| | | | AKYDKLHLECFNWDKSWWCALIPQFSLS | | |
| | | | WNESLSVDTAIFNLINCK | | |
| AB759118 | 7116-8957 | gb:AB759118: | MASPSELNRSQATLYEGDPNSKRTWRTVY | 11 | 75 |
| | | 7116- | RASTLILDLAILCVSIVAIVRMSTLTPSDVT | | |
| | | 8957\|Organism: | DSISSSITSLSDTYQSVWSDTHQKVNSIFKE | | |
| | | Avian | VGISIPVTLDKMQVEMGTAVNIITDAVRQL | | |
| | | paramyxovirus | QGVNGSAGFSITNSPEYSGGIDALIYPQKSL | | |
| | | 6\|Strain | NGKSLAISDLLEHPSFIPAPTTSHGCTRIPTF | | |
| | | Name:red- | HLGYRHWCYSHNTIESGCHDAGESIMYLS | | |
| | | necked | MGAVGVGHQGKPVFTTSAAVILDDGKNR | | |
| | | stint/Japan/ | KSCSVVANPNGCDVLCSLVKQTEDQDYA | | |
| | | 8KS0813/2008\| | DPTPTPMIHGRLHFNGTYTESMLDQSLFTG | | |
| | | Protein | HWVAQYPAVGSGSVSHGRLFFPLYGGISK | | |
| | | Name: | SSSLFPKLRAHAYFTHNEELECKNLTSKQR | | |
| | | hemagglutinin- | EDLFNAYMPGKIAGSLWAQGIVICNLTTL | | |
| | | neuraminidase\| | ADCKIAVANTSTMMMAAEGRLQLVQDK | | |
| | | Gene | VVLYQRSSSWWPVLIYYDILVSELVNARH | | |
| | | Symbol:HN | LDIVNWVPYPQSKFPRPTWTKGLCEKPSIC | | |
| | | | PAVCVTGVYQDVWVVSVGDFSNETVVIG | | |
| | | | GYLEAASERKDPWIAAANQYNWLTRRQL | | |
| | | | FTAQTEAAYSSTTCFRNTHQDKVFCLTIME | | |
| | | | VTDNLLGDWRIAPLLYEVTVVDRQQSSRK | | |
| | | | AVAMSEAHRTRFKYYSPENKFTPQH | | |
| AY141760 | 6791-8485 | gb:AY141760\| | MDPKSYYCNEDLRSDGGEKSPGGDLYKGI | 8 | 76 |
| | | Organism:Fer- | ILVSTVISLIIAIISLAFIIDNKINIQSLDPLRG | | |
| | | de-Lance | LEDSYLVPIKDKSESISQDIQEGIFPRLNLIT | | |
| | | paramyxovirus1 | AATTTTIPRSIAIQTKDLSDLIMNRCYPSVV | | |
| | | Strain | NNDTSCDVLAGAIHSNLFSQLDPSTYWTC | | |
| | | Name:ATCC | SSGTPTMNQTVKLLPDNSQIPGSTYSTGCV | | |
| | | VR-895\|Protein | RIPTFSLGSMIYSYSHNVIYEGCNDHSKSSQ | | |
| | | Name: | YWQLGYISTSKTGEPLQQVSRTLTLNNGL | | |
| | | hemagglutinin- | NRKSCSTVAQGRGAYLLCTNVVEDERTD | | |
| | | neuraminidase | YSTEGIQDLTLDYIDIFGAERSYRYTNNEV | | |
| | | protein | DLDRPYAALYPSVGSGTVYNDRILFLGYG | | |
| | | HN\|Gene | GLMTPYGDQAMCQAPECTSATQEGCNSN | | |
| | | Symbol:HN | QLIGYFSGRQIVNCIIEIITVGTEKPIIRVRTI | | |
| | | | PNSQVWLGAEGRIQTLGGVLYLYIRSSGW | | |
| | | | HALAQTGIILTLDPIRISWIVNTGYSRPGNG | | |
| | | | PCSASSRCPAQCITGVYTDIFPLSQNYGYL | | |
| | | | ATVTLLSGVDRVNPVISYGTSTGRVADSQ | | |
| | | | LTSSSQVAAYTTTTCFTFNQKGYCYHIIEL | | |
| | | | SPATLGIFQPVLVVTEIPKICS | | |
| EU877976 | 6248-8161 | gb:EU877976: | MQGNMEGSRDNLTVDDELKTTWRLAYR | 8 | 77 |
| | | 6248- | VVSLLLMVSALIISIVILTRDNSQSIITAINQS | | |
| | | 8161\|Organism: | SDADSKWQTGIEGKITSIMTDTLDTRNAAL | | |
| | | Avian | LHIPLQLNTLEANLLSALGGNTGIGPGDLE | | |
| | | paramyxovirus | HCRYPVHDTAYLHGVNRLLINQTADYTAE | | |
| | | 4\|Strain | GPLDHVNFIPAPVTTTGCTRIPSFSVSSSIW | | |
| | | Name:APMV- | CYTHNVIETGCNDHSGSNQYISMGVIKRA | | |
| | | 4/KR/YJ/06\| | GNGLPYFSTVVSKYLTDGLNRKSCSVAAG | | |
| | | Protein | SGHCYLLCSLVSEPEPDDYVSPDPTPMRLG | | |
| | | Name: | VLTWDGSYTEQAVPERIFKNIWSANYPGV | | |
| | | hemagglutinin- | GSGAIVGNKVLFPFYGGVRNGSTPEVMNR | | |
| | | neuraminidase\| | GRYYYIQDPNDYCPDPLQDQILRAEQSYY | | |
| | | Gene | PTRFGRRMVMQGVLACPVSNNSTIASQCQ | | |
| | | Symbol:HN | SYYFNNSLGFIGAESRIYYLNGNIYLYQRS | | |
| | | | SSWWPHPQIYLLDSRIASPGTQNIDSGVNL | | |
| | | | KMLNVTVITRPSSGFCNSQSRCPNDCLFGV | | |
| | | | YSDIWPLSLTSDSIFAFTMYLQGKTTRIDPA | | |
| | | | WALFSNHAIGHEARLFNKEVSAAYSTTTC | | |
| | | | FSDTIQNQVYCLSILEVRSELLGAFKIVPFL | | |
| | | | YRVL | | |
| AB176531 | 6821-8536 | gb:AB176531: | MEDYSNLSLKSIPKRTCRIIFRTATILGICTL | 7 | 78 |
| | | 6821- | IVLCSSILHEIIHLDVSSGLMDSDDSQQGIIQ | | |
| | | 8536\|Organism: | PIIESLKSLIALANQILYNVAIIIPLKIDSIETV | | |
| | | Human | IFSALKDMHTGSMSNTNCTPGNLLLHDAA | | |
| | | parainfluenza | YINGINKFLVLKSYNGTPKYGPLLNIPSFIP | | |
| | | virus 2\|Strain | SATSPNGCTRIPSFSLIKTHWCYTHNVMLG | | |
| | | Name:Nishio\| | DCLDFTTSNQYLAMGIIQQSAAAFPIFRTM | | |
| | | Protein | KTIYLSDGINRKSCSVTAIPGGCVLYCYVA | | |
| | | Name: | TRSEKEDYATTDLAELRLAFYYYNDTFIER | | |
| | | hemagglutinin- | VISLPNTTGQWATINPAVGSGIYHLGFILFP | | |
| | | neuraminidase | VYGGLISGTPSYNKQSSRYFIPKHPNITCAG | | |
| | | protein\|Gene | NSSEQAAAARSSYVIRYHSNRLIQSAVLIC | | |
| | | Symbol:HN | PLSDMHTARCNLVMFNNSQVMMGAEGR | | |
| | | | LYVIDNNLYYYQRSSSWWSASLFYRINTD | | |
| | | | FSKGIPPIIEAQWVPSYQVPRPGVMPCNAT | | |
| | | | SFCPANCITGVYADVWPLNDPEPTSQNAL | | |
| | | | NPNYRFAGAFLRNESNRTNPTFYTASASA | | |
| | | | LLNTTGFNNTNHKAAYTSSTCFKNTGTQK | | |
| | | | IYCLIIIEMGSSLLGEFQIIPFLRELIP | | |
| AF052755 | 6584-8281 | gb:AF052755\| | MVAEDAPVRATCRVLFRTTTLIFLCTLLAL | 7 | 79 |
| | | Organism: | SISILYESLITQKQIMSQAGSTGSNSGLGSIT | | |
| | | Parainfluenza virus | DLLNNILSVANQIIYNSAVALPLQLDTLEST | | |
| | | 5\|Strain | LLTAIKSLQTSDKLEQNCSWSAALINDNRY | | |
| | | Name:W3A\| | INGINQFYFSIAEGRNLTLGPLLNMPSFIPT | | |
| | | Protein | ATTPEGCTRIPSFSLTKTHWCYTHNVILNG | | |
| | | Name: | CQDHVSSNQFVSMGIIEPTSAGFPFFRTLKT | | |
| | | hemagglutinin- | LYLSDGVNRKSCSISTVPGGCMMYCFVST | | |
| | | neuraminidase | QPERDDYFSAAPPEQRIIIMYYNDTIVERII | | |
| | | protein\|Gene | NPPGVLDVWATLNPGTGSGVYYLGWVLF | | |
| | | Symbol:HN | PIYGGVIKGTSLWNNQANKYFIPQMVAAL | | |
| | | | CSQNQATQVQNAKSSYYSSWFGNRMIQS | | |
| | | | GILACPLRQDLTNECLVLPFSNDQVLMGA | | |
| | | | EGRLYMYGDSVYYYQRSNSWWPMTMLY | | |
| | | | KVTITFTNGQPSAISAQNVPTQQVPRPGTG | | |
| | | | DCSATNRCPGFCLTGVYADAWLLTNPSST | | |
| | | | STFGSEATFTGSYLNTATQRINPTMYIANN | | |
| | | | TQIISSQQFGSSGQEAAYGHTTCFRDTGSV | | |
| | | | MVYCIYIIELSSSLLGQFQIVPFIRQVTLS | | |
| BK005918 | 6560-8290 | gb:BK005918\| | MSQLGTDQIMHLAQPAIARRTWRLCFRIF | 7 | 80 |
| | | Organism: | ALFILIAIVITQIFMLTFDHTLLTTTQFLTSIG | | |
| | | Porcine | NLQSTITSWTPDVQAMLSISNQLIYTTSITL | | |
| | | rubulavirus\| | PLKISTTEMSILTAIRDHCHCPDCSSACPTR | | |
| | | Strain | QMLLNDPRYMSGVNQFIGAPTESINITFGP | | |
| | | Name: | LFGIPSFIPTSTTTQGCTRIPSFALGPSHWCY | | |
| | | UNKNOWN- | THNFITAGCADGGHSNQYLAMGTIQSASD | | |
| | | BK005918\| | GSPLLITARSYYLSDGVNRKSCSIAVVPGG | | |
| | | Protein | CAMYCYVATRSETDYYAGNSPPQQLLTL | | |
| | | Name: | VFSNDTIIERTIHPTGLANGWVMLVPGVGS | | |
| | | attachment protein\| | GTLYNEYLLFPAYGGMQQILANQSGEINQ | | |
| | | Gene | PPTPYNATVRCAMAQPQFSQRAAASYYPR | | |
| | | Symbol:HN | YFSNRWIRSAIVACPYRAIYQTQCTLIPLPN | | |
| | | | RMVMMGSEGRIFTLGDRLFYYQRSSSWW | | |
| | | | PYPLLYQVGLNFLTTPPSVSSMTQVPLEHL | | |
| | | | ARPGKGGCPGNSHCPATCVTGVYADVWP | | |
| | | | LTDPRSGVGGTSLVAAGGLDSTSERMAPV | | |
| | | | NYLAIGESLLSKTYLLSKTQPAAYTTTTCF | | |
| | | | RDTDTGKIYCITIAELGKVLLGEFQIVPFLR | | |
| | | | EIKIQSRY | | |
| EU338414 | 6015-7913 | gb:EU338414: | MDFPSRENLAAGDISGRKTWRLLFRILTLS | 7 | 81 |
| | | 6015- | IGVVCLAINIATIAKLDHLDNMASNTWTTT | | |
| | | 7913\|Organism: | EADRVISSITTPLKVPVNQINDMFRIVALDL | | |
| | | Avian | PLQMTSLQKEITSQVGFLAESINNVLSKNG | | |
| | | paramyxovirus | SAGLVLVNDPEYAGGIAVSLYQGDASAGL | | |
| | | 2\|Strain | NFQPISLIEHPSFVPGPTTAKGCIRIPTFHMG | | |
| | | Name:APMV- | PSHWCYSHNIIASGCQDASHSSMYISLGVL | | |
| | | 2/Chicken/ | KASQTGSPIFLTTASHLVDDNINRKSCSIVA | | |
| | | California/Yucaipa/ | SKYGCDILCSIVIETENEDYRSDPATSMIIG | | |
| | | 56\|Protein | RLFFNGSYTESKINTGSIFSLFSANYPAVGS | | |
| | | Name: | GIVVGDEAAFPIYGGVKQNTWLFNQLKDF | | |
| | | hemagglutinin- | GYFTHNDVYKCNRTDIQQTILDAYRPPKIS | | |
| | | neuraminidase\| | GRLWVQGILLCPVSLRPDPGCRLKVFNTS | | |
| | | Gene | NVMMGAEARLIQVGSTVYLYQRSSSWWV | | |
| | | Symbol:HN | VGLTYKLDVSEITSQTGNTLNHVDPIAHTK | | |
| | | | FPRPSFRRDACARPNICPAVCVSGVYQDIW | | |
| | | | PISTATNNSNIVWVGQYLEAFYSRKDPRIG | | |
| | | | IATQYEWKVTNQLFNSNTEGGYSTTTCFR | | |
| | | | NTKRDKAYCVVISEYADGVFGSYRIVPQLI | | |
| | | | EIRTTTGKSE | | |
| KC403973 | 6234-6964 | gb:KC403973: | MEVKVENIRTIDMLKARVKNRVARSKCFK | 6 | 82 |
| | | 6234- | NASLILIGITTLSIALNIYLIINYTMQENTSES | | |
| | | 6964\|Organism: | EHHTSSSPMESSRETPTVPIDNSDTNPSSQY | | |
| | | Human | PTQQSTEGSTLYFAASASSPETEPTSTPDTT | | |
| | | metapneumovirus | SRPPFVDTHTTPPSASRTKTSPAVHTKNNP | | |
| | | \|Strain | RISSRTHSPPWAMTRTVRRTTTLRTSSIRK | | |
| | | Name:HMPV/ | RSSTASVQPDSSATTHKHEEASPVSPQTSA | | |
| | | USA/TN-82- | STTRPQRKSMEASTSTTYNQTS | | |
| | | 518/1982/A\| | | | |
| | | Protein | | | |
| | | Name: | | | |
| | | attachment | | | |
| | | glycoprotein | | | |
| | | G\|Gene | | | |
| | | Symbol:G\| | | | |
| | | Segment:8 | | | |
| KF015281 | 4511-5844 | gb:KF015281: | MRPAEQLIQENYKLTSLSMGRNFEVSGST | 6 | 83 |
| | | 4511- | TNLNFERTQYPDTFRAVVKVNQMCKLIAG | | |
| | | 5844\|Organism: | VLTSAAVAVCVGVIMYSVFTSNHKANSM | | |
| | | Canine | QNATIRNSTSAPPQPTAGPPTTEQGTTPKFT | | |
| | | pneumo virus\| | KPPTKTTTHHEITEPAKMVTPSEDPYQCSS | | |
| | | Strain | NGYLDRPDLPEDFKLVLDVICKPPGPEHHS | | |
| | | Name:dog/Bari/ | TNCYEKREINLGSVCPDLVTMKANMGLN | | |
| | | 100- | NGGGEEAAPYIEVITLSTYSNKRAMCVHN | | |
| | | 12/ITA/2012\| | GCDQGFCFFLSGLSTDQKRAVLELGGQQA | | |
| | | Protein | IMELHYDSYWKHYWSNSNCVVPRTNCNL | | |
| | | Name: | TDQTVILFPSFNNKNQSQCTTCADSAGLD | | |
| | | attachment protein\| | NKFYLTCDGLSRNLPLVGLPSLSPQAHKA | | |
| | | Gene | ALKQSTGTTTAPTPETRNPTPAPRRSKPLS | | |
| | | Symbol:G | RKKRALCGVDSSREPKPTMPYWCPMLQL | | |
| | | | FPRRSNS | | |
| KF973339 | 4624-5310 | gb:KF973339: | MSKTKDQRAAKTLEKTWDTLNHLLFISSC | 6 | 84 |
| | | 4624- | LYKSNLKSIAQITLSILAMTIPTSLIIVATTFI | | |
| | | 5310\|Organism: | ASANNKVTPTTAIIQDATSQIKNTTPTHLT | | |
| | | Respiratory | QNPQPGISFFNLSGTISQTTAILAPTTPSVEP | | |
| | | syncytial virus | ILQSTTVKTKNTTTTQIQPSKLTTKQRQNK | | |
| | | type A\|Strain | PPNKPNDDFHFEVFNFVPCSICSNNPTCWA | | |
| | | Name:RSV- | ICKRIPSKKPGKKTTTKPTKKQTIKTTKKD | | |
| | | A/US/BID- | LKPQTTKPKEAPTT | | |
| | | V7358/2002\| | | | |
| | | Protein | | | |
| | | Name:truncated | | | |
| | | attachment | | | |
| | | glycoprotein\| | | | |
| | | Gene Symbol:G | | | |
| FJ215864 | 6383-8116 | gb:FJ215864: | MSNIASSLENIVEQDSRKTTWRAIFRWSVL | 5 | 85 |
| | | 6383- | LITTGCLALSIVSIVQIGNLKIPSVGDLADE | | |
| | | 8116\|Organism: | VVTPLKTTLSDTLRNPINQINDIFRIVALDIP | | |
| | | Avian | LQVTSIQKDLASQFSMLIDSLNAIKLGNGT | | |
| | | paramyxovirus | NLIIPTSDKEYAGGIGNPVFTVDAGGSIGFK | | |
| | | 8\|Strain | QFSLIEHPSFIAGPTTTRGCTRIPTFHMSESH | | |
| | | Name:pintail/ | WCYSHNIIAAGCQDASASSMYISMGVLHV | | |
| | | Walcuya/20/78\| | SSSGTPIFLTTASELIDDGVNRKSCSIVATQ | | |
| | | Protein | FGCDILCSIVIEKEGDDYWSDTPTPMRHGR | | |
| | | Name: | FSFNGSFVETELPVSSMFSSFSANYPAVGS | | |
| | | hemagglutinin- | GEIVKDRILFPIYGGIKQTSPEFTELVKYGL | | |
| | | neuraminidase | FVSTPTTVCQSSWTYDQVKAAYRPDYISG | | |
| | | protein\|Gene | RFWAQVILSCALDAVDLSSCIVKIMNSSTV | | |
| | | Symbol:HN | MMAAEGRIIKIGIDYFYYQRSSSWWPLAF | | |
| | | | VTKLDPQELADTNSIWLTNSIPIPQSKFPRP | | |
| | | | SYSENYCTKPAVCPATCVTGVYSDIWPLT | | |
| | | | SSSSLPSIIWIGQYLDAPVGRTYPRFGIANQ | | |
| | | | SHWYLQEDILPTSTASAYSTTTCFKNTARN | | |
| | | | RVFCVTIAEFADGLFGEYRITPQLYELVRN | | |
| | | | N | | |
| JX857409 | 6619-8542 | gb:JX857409: | MEETKVKTSEYWARSPQIHATNHPNVQN | 5 | 86 |
| | | 6619- | REKIKEILTILISFISSLSLVLVIAVLIMQSLH | | |
| | | 8542\|Organism: | NGTILRCKDVGLESINKSTYSISNAILDVIK | | |
| | | Porcine | QELITRIINTQSSVQVALPILINKKIQDLSLII | | |
| | | parainfluenza | EKSSKVHQNSPTCSGVAALTHVEGIKPLDP | | |
| | | virus 1\|Strain | DDYWRCPSGEPYLEDELTLSLIPGPSMLAG | | |
| | | Name:S206N\| | TSTIDGCVRLPSLAIGKSLYAYSSNLITKGC | | |
| | | Protein | QDIGKSYQVLQLGIITLNSDLHPDLNPIISH | | |
| | | Name: | TYDINDNRKSCSVAVSETKGYQLCSMPRV | | |
| | | haemagglutinin | NEKTDYTSDGIEDIVFDVLDLKGSSRSFKF | | |
| | | protein\|Gene | SNNDINFDHPFSALYPSVGSGIIWKNELYF | | |
| | | Symbol:H | LGYGALTTALQGNTKCNLMGCPGATQDN | | |
| | | | CNKFISSSWLYSKQMVNVLIQVKGYLSSK | | |
| | | | PSIIVRTIPITENYVGAEGKLVGTRERIYIYT | | |
| | | | RSTGWHTNLQIGVLNINHPITITWTDHRVL | | |
| | | | SRPGRSPCAWNNKCPRNCTTGVYTDAYPI | | |
| | | | SPDANYVATVTLLSNSTRNNPTIMYSSSDR | | |
| | | | VYNMLRLRNTELEAAYTTTSCIVHFDRGY | | |
| | | | CFHIIEINQKELNTLQPMLFKTAIPKACRIS | | |
| | | | NL | | |
| KF908238 | 7510-9249 | gb:KF908238: | MQDSRGNTQIFSQANSMVKRTWRLLFRIV | 5 | 87 |
| | | 7510- | TLILLISIFVLSLIIVLQSTPGNLQSDVDIIRK | | |
| | | 9249\|Organism: | ELDELMENFETTSKSLLSVANQITYDVSVL | | |
| | | Human | TPIRQEATETNIIAKIKDHCKDRVVKGEST | | |
| | | parainfluenza | CTLGHKPLHDVSFLNGFNKFYFTYRDNVQ | | |
| | | virus 4b\|Strain | IRLNPLLDYPNFIPTATTPHGCIRIPSFSLSQ | | |
| | | Name:QLD- | THWCYTHNTILRGCEDTASSKQYVSLGTL | | |
| | | 01\|Protein | QTLENGDPYFKVEYSHYLNDRKNRKSCSV | | |
| | | Name: | VAVLDGCLLYCVIMTKNETENFKDPQLAT | | |
| | | hemagglutinin- | QLLTYISYNGTIKERIINPPGSSRDWVHISP | | |
| | | neuraminidase | GVGSGILYSNYIIFPLYGGLMENSMIYNNQ | | |
| | | protein\|Gene | SGKYFFPNSTKLPCSNKTSEKITGAKDSYTI | | |
| | | Symbol:HN | TYFSKRLIQSAFLICDLRQFLSEDCEILIPSN | | |
| | | | DHMLVGAEGRLYNIENNIFYYQRGSSWW | | |
| | | | PYPSLYRIKLNSNKKYPRIIEIKFTKIEIAPRP | | |
| | | | GNKDCPGNKACPKECITGVYQDIWPLSYP | | |
| | | | NTAFPHKKRAYYTGFYLNNSLARRNPTFY | | |
| | | | TADNLDYHQQERLGKFNLTAGYSTTTCFK | | |
| | | | QTTTARLYCLYILEVGDSVIGDFQIFPFLRS | | |
| | | | IDQAIT | | |
| KT071757 | 6066-7962 | gb:KT071757: | MDALSRENLTEISQGGRRTWRMLFRILTL | 5 | 88 |
| | | 6066- | VLTLVCLAINIATIAKLDSIDTSKVQTWTTT | | |
| | | 7962\|Organism: | ESDRVIGSLTDTLKIPINQVNDMFRIVALDL | | |
| | | Avian | PLQMTTLQKEIASQVGFLAESINNFLSKNG | | |
| | | paramyxovirus | SAGSVLVNDPEYAGGIGTSLFHGDSASGL | | |
| | | 2\|Strain | DFEAPSLIEHPSFIPGPTTAKGCIRIPTFHMS | | |
| | | Name:APMV- | ASHWCYSHNIIASGCQDAGHSSMYISMGV | | |
| | | 2/Emberiza | LKATQAGSPSFLTTASQLVDDKLNRKSCSI | | |
| | | spodocephala/ | ISTTYGCDILCSLVVENEDADYRSDPPTDM | | |
| | | China/Daxing'anling/ | ILGRLFFNGTYSESKLNTSAIFQLFSANYPA | | |
| | | 974/2013\| | VGSGIVLGDEIAFPVYGGVKQNTWLFNQL | | |
| | | Protein | KDYGYFAHNNVYKCNNSNIHQTVLNAYR | | |
| | | Name: | PPKISGRLWSQVVLICPMRLFINTDCRIKVF | | |
| | | hemagglutinin- | NTSTVMMGAEARLIQVGSDIYLYQRSSSW | | |
| | | neuraminidase | WVVGLTYKLDFQELSSKTGNILNNVSPIA | | |
| | | protein\|Gene | HAKFPRPSYSRDACARPNICPAVCVSGVY | | |
| | | Symbol:HN | QDIWPISTAHNLSQVVWVGQYLEAFYARK | | |
| | | | DPWIGIATQYDWKKNVRLFNANTEGGYS | | |
| | | | TTTCFRNTKRDKAFCVIISEYADGVFGSYR | | |
| | | | IVPQLIEIRTTSKKGLPS | | |
| LC041132 | 6605-8437 | gb:LC041132: | MQPGISEVSFVNDERSERGTWRLLFRILTI | 4 | 89 |
| | | 6605- | VLCLTSIGIGIPALIYSKEAATSGDIDKSLEA | | |
| | | 8437\|Organism: | VKTGMSTLSSKIDESINTEQKIYRQVILEAP | | |
| | | Avian | VSQLNMESNILSAITSLSYQIDGTSNSSGCG | | |
| | | paramyxovirus | SPMHDQDFVGGINKEIWTTDNVNLGEITL | | |
| | | goose/Shimane/ | TPFLEHLNFIPAPTTGNGCTRIPSFDLGLTH | | |
| | | 67/2000\|Strain | WCYTHNVILSGCQDYSSSFQYIALGVLKIS | | |
| | | Name:goose/ | ATGHVFLSTMRSINLDDERNRKSCSISATSI | | |
| | | Shimane/67/2000\| | GCDIICSLVTEREVDDYNSPAATPMIHGRL | | |
| | | Protein | DFSGKYNEVDLNVGQLFGDWSANYPGVG | | |
| | | Name: | GGSFLNGRVWFPIYGGVKEGTPTFKENDG | | |
| | | hemagglutinin- | RYAIYTRYNDTCPDSESEQVSRAKSSYRPS | | |
| | | neuraminidase\| | YFGGKLVQQAVLSIKIDDTLGLDPVLTISN | | |
| | | Gene | NSITLMGAESRVLQIEEKLYFYQRGTSWFP | | |
| | | Symbol:HN | SLIMYPLTVDDKMVRFEPPTIFDQFTRPGN | | |
| | | | HPCSADSRCPNACVTGVYTDGYPIVFHNN | | |
| | | | HSIAAVYGMQLNDVTNRLNPRSAVWYGV | | |
| | | | SMSNVIRVSSSTTKAAYTTSTCFKVKKTQR | | |
| | | | VYCLSIGEIGNTLFGEFRIVPLLLEVYSEKG | | |
| | | | KSLKSSFDGWEDISINNPLRPLDNHRVDPIL | | |
| | | | ISNYTSSWP | | |
| AF092942 | 4705-5478 | gb:AF092942\| | MSNHTHHLKFKTLKRAWKASKYFIVGLSC | 3 | 90 |
| | | Organism: | LYKFNLKSLVQTALTTLAMITLTSLVITAII | | |
| | | Bovine respiratory | YISVGNAKAKPTSKPTIQQTQQPQNHTSPF | | |
| | | syncytial | FTEHNYKSTHTSIQSTTLSQLPNTDTTRETT | | |
| | | virus\|Strain | YSHSINETQNRKIKSQSTLPATRKPPINPSG | | |
| | | Name: ATue51908 | SNPPENHQDHNNSQTLPYVPCSTCEGNLA | | |
| | | \|Protein | CLSLCQIGPERAPSRAPTITLKKTPKPKTTK | | |
| | | Name: | KPTKTTIHHRTSPEAKLQPKNNTAAPQQGI | | |
| | | attachment | LSSPEHHTNQSTTQI | | |
| | | glycoprotein\| | | | |
| | | Gene Symbol:G | | | |
| AF326114 | 6691-847 | gb:AF326114\| | MWNSIPQLVSDHEEAKGKFTDIPLQDDTD | 3 | 91 |
| | | Organism: | SQHPSGSKSTCRTLFRTVSIILSLVILVLGVT | | |
| | | Menangle | STMFSAKYSGGCATNSQLLGVSNLINQIQK | | |
| | | virus\|Strain | SIDSLISEVNQVSITTAVTLPIKIMDFGKSVT | | |
| | | Name: | DQVTQMIRQCNTVCKGPGQKPGSQNVRI | | |
| | | UNKNOWN- | MPSNNLSTFQNINMSARGIAYQDVPLTFV | | |
| | | AF326114\| | RPIKNPQSCSRFPSYSVSFGVHCFANAVTD | | |
| | | Protein | QTCELNQNTFYRVVLSVSKGNISDPSSLET | | |
| | | Name: | KAETRTPKGTPVRTCSIISSVYGCYLLCSK | | |
| | | attachment protein\| | ATVPESEEMKTIGFSQMFILYLSMDSKRIIY | | |
| | | Gene Symbol:HN | DNIVSSTSAIWSGLYPGEGAGIWHMGQLF | | |
| | | | FPLWGGIPFLTPLGQKILNSTLDIPEVGSKC | | |
| | | | KSDLTSNPAKTKDMLFSPYYGENVMVFGF | | |
| | | | LTCYLLSNVPTNCHADYLNSTVLGFGSKA | | |
| | | | QFYDYRGIVYMYIQSAGWYPFTQIFRITLQ | | |
| | | | LKQNRLQAKSIKRIEVTSTTRPGNRECSVL | | |
| | | | RNCPYICATGLFQVPWIVNSDAITSKEVDN | | |
| | | | MVFVQAWAADFTEFRKGILSLCSQVSCPI | | |
| | | | NDLLSKDNSYMRDTTTYCFPQTVPNILSCT | | |
| | | | SFVEWGGDSGNPINILEIHYEVIFVAS | | |
| GU206351 | 7500-9714 | gb:GU206351: | MDKSYYTEPEDQRGNSRTWRLLFRLIVLT | 3 | 92 |
| | | 7500- | LLCLIACTSVSQLFYPWLPQVLSTLISLNSSI | | |
| | | 9714\|Organism: | ITSSNGLKKEILNQNIKEDLIYREVAINIPLT | | |
| | | Avian | LDRVTVEVGTAVNQITDALRQLQSVNGSA | | |
| | | paramyxovirus | AFALSNSPDYSGGIEHLVFQRNTLINRSVS | | |
| | | 5\|Strain | VSDLIEHPSFIPTPTTQHGCTRIPTFHLGTRH | | |
| | | Name:budgerigar/ | WCYSHNIIGQGCADSGASMMYISMGALG | | |
| | | Kunitachi/74 | VSSLGTPTFTTSATSILSDSLNRKSCSIVATT | | |
| | | \|Protein | EGCDVLCSIVTQTEDQDYADHTPTPMIHG | | |
| | | Name: | RLWFNGTYTERSLSQSLFLGTWAAQYPAV | | |
| | | hemagglutinin | GSGIMTPGRVIFPFYGGVIPNSPLFLDLERF | | |
| | | neuraminidase | ALFTHNGDLECRNLTQYQKEAIYSAYKPP | | |
| | | protein\|Gene | KIRGSLWAQGFIVCSVGDMGNCSLKVINT | | |
| | | Symbol:HN | STVMMGAEGRLQLVGDSVMYYQRSSSW | | |
| | | | WPVGILYRLSLVDIIARDIQVVINSEPLPLS | | |
| | | | KFPRPTWTPGVCQKPNVCPAVCVTGVYQ | | |
| | | | DLWAISAGETLSEMTFFGGYLEASTQRKD | | |
| | | | PWIGVANQYSWFMRRRLFKTSTEAAYSSS | | |
| | | | TCFRNTRLDRNFCLLIFELTDNLLGDWRIV | | |
| | | | PLLFELTIV | | |
| JQ001776 | 8170-10275 | gb:JQ001776: | MLSQLQKNYLDNSNQQGDKMNNPDKKLS | 3 | 93 |
| | | 8170- | VNFNPLELDKGQKDLNKSYYVKNKNYNV | | |
| | | 10275\|Organism: | SNLLNESLHDIKFCIYCIFSLLIIITIINIITISIV | | |
| | | Cedar | ITRLKVHEENNGMESPNLQSIQDSLSSLTN | | |
| | | virus\|Strain | MINTEITPRIGILVTATSVTLSSSINYVGTKT | | |
| | | Name:CG1a\| | NQLVNELKDYITKSCGFKVPELKLHECNIS | | |
| | | Protein | CADPKISKSAMYSTNAYAELAGPPKIFCKS | | |
| | | Name: | VSKDPDFRLKQIDYVIPVQQDRSICMNNPL | | |
| | | attachment | LDISDGFFTYIHYEGINSCKKSDSFKVLLSH | | |
| | | glycoprotein\| | GEIVDRGDYRPSLYLLSSHYHPYSMQVINC | | |
| | | Gene Symbol:G | VPVTCNQSSFVFCHISNNTKTLDNSDYSSD | | |
| | | | EYYITYFNGIDRPKTKKIPINNMTADNRYI | | |
| | | | HFTFSGGGGVCLGEEFIIPVTTVINTDVFTH | | |
| | | | DYCESFNCSVQTGKSLKEICSESLRSPTNSS | | |
| | | | RYNLNGIMIISQNNMTDFKIQLNGITYNKL | | |
| | | | SFGSPGRLSKTLGQVLYYQSSMSWDTYLK | | |
| | | | AGFVEKWKPFTPNWMNNTVISRPNQGNC | | |
| | | | PRYHKCPEICYGGTYNDIAPLDLGKDMYV | | |
| | | | SVILDSDQLAENPEITVFNSTTILYKERVSK | | |
| | | | DELNTRSTTTSCFLFLDEPWCISVLETNRF | | |
| | | | NGKSIRPEIYSYKIPKYC | | |
| KP271123 | 6644-8431 | gb:KP271123: | MWSTQASKHPAMVNSATNLVDIPLDHPSS | 3 | 94 |
| | | 6644- | AQFPINRKRTGRLIYRLFSILCNLILISILISL | | |
| | | 8431\|Organism: | VVIWSRSSRDCAKSDGLSSVDNQLSSLSRS | | |
| | | Teviot | INSLITEVNQISVTTAINLPIKLSEFGKSVVD | | |
| | | virus\|Strain | QVTQMIRQCNAACKGPGEKPGIQNVRINIP | | |
| | | Name:Geelong\| | NNFSTYSELNRTANSLNFQSRTALFARPNP | | |
| | | Protein | YPKTCSRFPSYSVYFGIHCFSHAVTDSSCE | | |
| | | Name: | LSDSTYYRLVIGVADKNLSDPADVKYIGE | | |
| | | attachment protein \| | TTTPVRVQTRGCSVVSSIYGCYLLCSKSNQ | | |
| | | Gene Symbol:HN | DYQDDFREQGFHQMFILFLSRELKTTFFDD | | |
| | | | MVSSTTVTWNGLYPGEGSGIWHMGHLVF | | |
| | | | PLWGGIRFGTHASEGILNSTLELPPVGPSC | | |
| | | | KRSLADNGLINKDVLFSPYFGDSVMVFAY | | |
| | | | LSCYMLSNVPTHCQVETMNSSVLGFGSRA | | |
| | | | QFYDLKGIVYLYIQSAGWFSYTQLFRLSLQ | | |
| | | | SKGYKLSVKQIKRIPISSTSRPGTEPCDIIHN | | |
| | | | CPYTCATGLFQAPWIVNGDSIRDRDVRNM | | |
| | | | AFVQAWSGAINTFQRPFMSICSQYSCPLSE | | |
| | | | LLDSESSIMRSTTTYCFPSLTESILQCVSFIE | | |
| | | | WGGPVGNPISINEVYSSISFRPD | | |
| AY286409 | 7644-9542 | gb:AY286409\| | MVDPPAVSYYTGTGRNDRVKVVTTQSTN | 2 | 95 |
| | | Organism: | PYWAHNPNQGLRRLIDMVVNVIMVTGVIF | | |
| | | Mossman | ALINIILGIVIISQSAGSRQDTSKSLDIIQHVD | | |
| | | virus\|Strain | SSVAITKQIVMENLEPKIRSILDSVSFQIPKL | | |
| | | Name: | LSSLLGPGKTDPPIALPTKASTPVIPTEYPSL | | |
| | | UNKNOWN- | NTTTCLRIEESVTQNAAALFNISFDLKTVM | | |
| | | AY286409\| | YELVTRTGGCVTLPSYSELYTRVRTFSTAI | | |
| | | Protein | RNPKTCQRAGQETDLNLIPAFIGTDTGILIN | | |
| | | Name: | SCVRQPVIATGDGIYALTYLTMRGTCQDH | | |
| | | attachment | RHAVRHFEIGLVRRDAWWDPVLTPIHHFT | | |
| | | glycoprotein\| | EPGTPVFDGCSLTVQNQTALALCTLTTDG | | |
| | | Gene Symbol:G | PETDIHNGASLGLALVHFNIRGEFSKHKVD | | |
| | | | PRNIDTQNQGLHLVTTAGKSAVKKGILYS | | |
| | | | FGYMVTRSPEPGDSKCVTEECNQNNQEKC | | |
| | | | NAYSKTTLDPDKPRSMIIFQIDVGAEYFTV | | |
| | | | DKVVVVPRTQYYQLTSGDLFYTGEENDLL | | |
| | | | YQLHNKGWYNKPIRGRVTFDGQVTLHEH | | |
| | | | SRTYDSLSNQRACNPRLGCPSTCELTSMAS | | |
| | | | YFPLDKDFKAAVGVIALRNGMTPIITYSTD | | |
| | | | DWRNHWKYIKNADLEFSESSLSCYSPNPP | | |
| | | | LDDYVLCTAVITAKVMSNTNPQLLATSW | | |
| | | | YQYDKCHT | | |
| AY900001 | 7809-9938 | gb:AY900001\| | MNPVAMSNFYGINQADHLREKGDQPEKG | 2 | 96 |
| | | Organism:J- | PSVLTYVSLITGLLSLFTIIALNVTNIIYLTG | | |
| | | virus\|Strain | SGGTMATIKDNQQSMSGSMRDISGMLVE | | |
| | | Name: | DLKPKTDLINSMVSYTIPSQISAMSAMIKN | | |
| | | UNKNOWN- | EVLRQCTPSFMFNNTICPIAEHPVHTSYFEE | | |
| | | AY900001\| | VGIEAISMCTGTNRKLVVNQGINFVEYPSF | | |
| | | Protein | IPGSTKPGGCVRLPSFSLGLEVFAYAHAIT | | |
| | | Name: | QDDCTSSSTPDYYFSVGRIADHGTDVPVFE | | |
| | | attachment | TLAEWFLDDKMNRRSCSVTAAGKGGWL | | |
| | | glycoprotein\| | GCSILVGSFTDELTSPEVNRISLSYMDTFGK | | |
| | | Gene Symbol:G | KKDWLYTGSEVRADQSWSALFFSVGSGV | | |
| | | | VIGDTVYFLVWGGLNHPINVDAMCRAPG | | |
| | | | CQSPTQSLCNYAIKPQEWGGNQIVNGILHF | | |
| | | | KHDTNEKPTLHVRTLSPDNNWMGAEGRL | | |
| | | | FHFHNSGKTFIYTRSSTWHTLPQVGILTLG | | |
| | | | WPLSVQWVDITSISRPGQSPCEYDNRCPHQ | | |
| | | | CVTGVYTDLFPLGVSYEYSVTAYLDQVQS | | |
| | | | RMNPKIALVGAQEKIYEKTITTNTQHADY | | |
| | | | TTTSCFAYKLRVWCVSIVEMSPGVITTRQP | | |
| | | | VPFLYHLNLGCQDTSTGSLTPLDAHGGTY | | |
| | | | LNTDPVGNKVDCYFVLHEGQIYFGMSVGP | | |
| | | | INYTYSIVGRSREIGANMNVSLNQLCHSVY | | |
| | | | TEFLKEKEHPGTRNNIDVEGWLLKRIETLN | | |
| | | | GTKIFGLDDLEGSGPGHQSGPEDPSIAPIGH | | |
| | | | N | | |
| ER99772 | 6150-6944 | gb:EF199772: | MEVKVENVGKSQELKVKVKNFIKRSDCK | 2 | 97 |
| | | 6150- | KKLFALILGLVSFELTMNIMLSVMYVESNE | | |
| | | 6944\|Organism: | ALSLCRIQGTPAPRDNKTNTENATKETTLH | | |
| | | Avian | TTTTTRDPEVRETKTTKPQANEGATNPSR | | |
| | | metapneumovirus | NLTTKGDKHQTTRATTEAELEKQSKQTTE | | |
| | | \|Strain | PGTSTQKHTPARPSSKSPTTTQATAQPTTP | | |
| | | Name:PL- | TAPKASTAPKNRQATTKKTETDTTTASRA | | |
| | | 2\|Protein | RNTNNPTETATTTPKATTETGKGKEGPTQ | | |
| | | Name: | HTTKEQPETTARETTTPQPRRTAGASPRAS | | |
| | | attachment | | | |
| | | glycoprotein\| | | | |
| | | Gene Symbol:G | | | |
| JF424833 | 5981-7156 | gb:JF424833: | MGSKLYMVQGTSAYQTAVGFWLDIGRRY | 2 | 98 |
| | | 5981- | ILAIVLSAFGLTCTVTIALTVSVIVEQSVLE | | |
| | | 7156\|Organism: | ECRNYNGGDRDWWSTTQEQPTTAPSATP | | |
| | | Avian | AGNYGGLQTARTRKSESCLHVQISYGDM | | |
| | | metapneumovirus | YSRSDTVLGGFDCMGLLVLCKSGPICQRD | | |
| | | \|Strain | NQVDPTALCHCRVDLSSVDCCKVNKISTN | | |
| | | Name:IT/Ty/A/ | SSTTSEPQKTNPAWPSQDNTDSDPNPQGIT | | |
| | | 259- | TSTATLLSTSLGLMLTSKTGTHKSGPPQAL | | |
| | | 01/03\|Protein | PGSNTNGKTTTDRELGSTNQPNSTTNGQH | | |
| | | Name: attachme | NKHTQRMTLPPSYDNTRTILQHTTPWEKT | | |
| | | nt protein\|Gene | FSTYKPTHSPTNESDQSLPTTQNSINCEHFD | | |
| | | Symbol:G | PQGKEKICYRVGSYNSNITKQCRIDVPLCS | | |
| | | | TYNTVCMKTYYTEPFNCWRRIWRCLCDD | | |
| | | | GVGLVEWCCTS | | |
| JN689227 | 7918-12444 | gb:JN689227: | MSQLAAHNLAMSNFYGIHQGGQSTSQKE | 2 | 99 |
| | | 7918- | EEQPVQGVIRYASMIVGLLSLFTIIALNVTN | | |
| | | 12444\|Organism: | IIYMTESGGTMQSIKNAQGSIDGSMKDLSG | | |
| | | Tailam | TIMEDIKPKTDLINSMVSYNIPAQLSMIHQI | | |
| | | virus\|Strain | IKNDVLKQCTPSFMFNNTICPLAENPTHSR | | |
| | | Name:TL8K\| | YFEEVNLDSISECSGNEMSLELGTEPEFIEY | | |
| | | Protein | PSFAPGSTKPGSCVRLPSFSLSSTVFAYTHT | | |
| | | Name: | IMGHGCSELDVGDHYLAIGRIADAGHEIPQ | | |
| | | attachment | PETISSWFINDKINRRSCTVAAGVMETWM | | |
| | | glycoprotein\| | GCVIMTETFYDDLDSLDTGKITISYLDVFG | | |
| | | Gene Symbol:G | RKKEWIYTRSEILYDYTYTSVYFSIGSGVV | | |
| | | | VGDTVYFLLWGSLSSPIEETAYCYAPGCSN | | |
| | | | YNQRMCNEAQRPAKFGHRQMANAILRFK | | |
| | | | TNSMGKPSISVRTLSPTVIPFGTEGRLIYSD | | |
| | | | FTKIIYLYLRSTSWYVLPLTGLLILGPPVSIS | | |
| | | | WVTQEAVSRPGEYPCGASNRCPKDCITGV | | |
| | | | YTDLFPLGARYEYAVTVYLNAETYRVNPT | | |
| | | | LALIDRSKIIARKKITTESQKAGYTTTTCFV | | |
| | | | FKLRIWCMSVVELAPATMTAFEPVPFLYQ | | |
| | | | LDLTCKRNNGTTAMQFSGQDGMYKSGRY | | |
| | | | KSPRNECFFEKVSNKYYFVVSTPEGIQPYE | | |
| | | | VRDLTPERVSHVIMYISDVCAPALSAFKKL | | |
| | | | IPAMRPITTLTIGNWQFRPVDISGGLRVNIY | | |
| | | | RNLTRYGDLSMSAPEDPGTDTFPGTHAPS | | |
| | | | KGHEEVGHYTLPNEKLSEVTTAAVKTKES | | |
| | | | LNLIPDTKDTRGEEENGSGLNEIITGHTTPG | | |
| | | | HIKTHPAETKVTKHTVIIPQIEEDGSGATTS | | |
| | | | TELQDETGYHTEDYNTTNTNGSLTAPNER | | |
| | | | NNYTSGDHTVSGEDITHTITVSDRTKTTQT | | |
| | | | LPTDNTFNQTPTKIQEGSPKSESTPKDYTAI | | |
| | | | ESEDSHFTDPTLIRSTPEGTIVQVIGDQFHS | | |
| | | | AVTQLGESNAIGNSEPIDQGNNLIPTTDRG | | |
| | | | TMDNTSSQSHSSTTSTQGSHSAGHGSQSN | | |
| | | | MNLTALADTDSVTDQSTSTQEIDHEHENV | | |
| | | | SSILNPLSRHTRVMRDTVQEALTGAWGFIR | | |
| | | | GMIP | | |
| KC562242 | 6178-6926 | gb:KC562242: | MEVRVENIRAIDMFKAKIKNRIRNSRCYR | 2 | 100 |
| | | 6178- | NATLILIGLTALSMALNIFLIIDHATLRNMI | | |
| | | 6926\|Organism: | KTENCANMPSAEPSKKTPMTSIAGPSTKPN | | |
| | | Human | PQQATQWTTENSTSPAATLEGHPYTGTTQ | | |
| | | metapneumovirus | TPDTTAPQQTTDKHTALPKSTNEQITQTTT | | |
| | | \|Strain | EKKTTRATTQKRKKEKKTQTKPQVQLQP | | |
| | | Name:HMPV/ | KQPTPPTKSEMQVRQSQHPTDPELTPLPKA | | |
| | | USA/C1- | VNRQPGQQNQAPHHIMHGEVQDPGERNT | | |
| | | 334/2004/B\| | QVSHPSS | | |
| | | Protein | | | |
| | | Name: | | | |
| | | attachment | | | |
| | | glycoprotein | | | |
| | | G\|Gene | | | |
| | | Symbol:G | | | |
| KC915036 | 6154-7911 | gb:KC915036: | MEVKIENVGKSQELRVKVKNFIKRSDCKK | 2 | 101 |
| | | 6154- | KLFALILGLISFDITMNIMLSVMYVESNEA | | |
| | | 7911\|Organism: | LSSCRVQGTPAPRDNRTNTENTAKETTLH | | |
| | | Avian | TMTTTRNTEAGGTKTTKPQADERATSPSK | | |
| | | metapneumovirus | NPTIGADKHKTTRATTEAEQEKQSKQTTE | | |
| | | type C\|Strain | PGTSTPKHIPARPSSKSPATTKTTTQPTTPT | | |
| | | Name:GDY\| | VAKGGTAPKNRQTTTKKTEADTPTTSRAK | | |
| | | oPrtein | QTNKPTGTETTPPRATTETDKDKEGPTQH | | |
| | | Name: | TTKEQPETTAGGTTTPQPRRTTSRPAPTTN | | |
| | | attachment | TKEGAETTGTRTTKSTQTSASPPRPTRSTPS | | |
| | | glycoprotein\| | KTATGTNKRATTTKGPNTASTDRRQQTRT | | |
| | | Gene Symbol:G | TPKQDQQTQTKAKTTTNKAHAKAATTPE | | |
| | | | HNTDTTDSMKENSKEDKTTRDPSSKATTK | | |
| | | | QENTSKGTTATNLGNNTEAGARTPPTTTP | | |
| | | | TRHTTEPATSTAGGHTKARTTRWKSTAAR | | |
| | | | QPTRNNTTADTKTAQSKQTTPAQLGNNTT | | |
| | | | PENTTPPDNKSNSQTNVAPTEEIEIGSSLWR | | |
| | | | RRYVYGPCRENALEHPMNPCLKDNTTWI | | |
| | | | YLDNGRNLPAGYYDSKTDKIICYGIYRGN | | |
| | | | SYCYGRIECTCKNGTGLLSYCCNSYNWS | | |
| LC168749 | 7239-9196 | gb:LC168749: | MSSPRDRVNAFYKDNLQFKNTRVVLNKE | 2 | 102 |
| | | 7239- | QLLIERPYMLLAVLFVMFLSLVGLLAIAGI | | |
| | | 9196\|Organism: | RLHRAAVNTAEINSGLTTSIDITKSIEYQVK | | |
| | | Rinderpest | DVLTPLFKIIGDEVGLRTPQRFTDLTKFISD | | |
| | | morbillivirus\| | KIKFLNPDKEYDFRDINWCISPPERIKINYD | | |
| | | Strain | QYCAHTAAEELITMLVNSSLAGTAVLRTS | | |
| | | Name:Lv\| | LVNLGRSCTGSTTTKGQFSNMSLALSGIYS | | |
| | | Protein Name:H | GRGYNISSMITITEKGMYGSTYLVGKHNQ | | |
| | | protein\|Gene | GARRPSTAWQRDYRVFEVGIIRELGVGTP | | |
| | | Symbol:H | VFHMTNYLELPRQPELEICMLALGEFKLA | | |
| | | | ALCLADNSVALHYGGLRDDHKIRFVKLG | | |
| | | | VWPSPADSDTLATLSAVDPTLDGLYITTHR | | |
| | | | GIIAAGKAVWAVPVTRTDDQRKMGQCRR | | |
| | | | EACREKPPPFCNSTDWEPLEAGRIPAYGIL | | |
| | | | TIRLGLADKPEIDIISEFGPLITHDSGMDLYT | | |
| | | | PLDGNEYWLTIPPLQNSALGTVNTLVLEPS | | |
| | | | LKISPNILTLPIRSGGGDCYTPTYLSDLADD | | |
| | | | DVKLSSNLVILPSRNLQYVSATYDTSRVEH | | |
| | | | AIVYYIYSTGRLSSYYYPVKLPIKGDPVSL | | |
| | | | QIGCFPWGLKLWCHHFCSVIDSGTGKQVT | | |
| | | | HTGAVGIEITCNSR | | |
| LC187310 | 8144-9871 | gb:LC187310: | MDSSQMNILDAMDRESSKRTWRGVFRVT | 2 | 103 |
| | | 8144- | TIIMVVTCVVLSAITLSKVAHPQGFDTNEL | | |
| | | 9871\|Organism: | GNGIVDRVSDKITEALTVPNNQIGEIFKIVA | | |
| | | Avian | LDLHVLVSSSQQAIAGQIGMLAESINSILSQ | | |
| | | paramyxovirus | NGSASTILSSSPEYAGGIGVPLFSNKLTNGT | | |
| | | 10\|Strain | VIKPITLIEHPSFIPGPTTIGGCTRIPTFHMAS | | |
| | | Name:rAPMV- | SHWCYSHNIIEKGCKDSGISSMYISLGVLQ | | |
| | | 10- | VLKKGTPVFLVTASAVLSDDRNRKSCSIIS | | |
| | | FI324/YmHA\| | SRFGCEILCSLVTEAESDDYKSDTPTGMVH | | |
| | | Protein | GRLYFNGTYREGLVDTETIFRDFSANYPG | | |
| | | Name: | VGSGEIVEGHIHFPIYGGVKQNTGLYNSLT | | |
| | | hemagglutinin- | PYWLDAKNKYDYCKLPYTNQTIQNSYKPP | | |
| | | neuraminidase\| | FIHGRFWAQGILSCELDLFNLGNCNLKIIRS | | |
| | | Gene | DKVMMGAESRLMLVGSKLLMYQRASSW | | |
| | | Symbol:HN | WPLGITQEIDIAELHSSNTTILREVKPILSSK | | |
| | | | FPRPSYQPNYCTKPSVCPAVCVTGVYTDM | | |
| | | | WPISITGNISDYAWISHYLDAPTSRQQPRIG | | |
| | | | IANQYFWIHQTTIFPTNTQSSYSTTTCFRNQ | | |
| | | | VRSRMFCLSIAEFADGVFGEFRIVPLLYEL | | |
| | | | RV | | |
| NC_004074 | 6590-8563 | gb:NC_004074: | MWATSESKAPIPANSTLNLVDVPLDEPQTI | 2 | 104 |
| | | 6590- | TKHRKQKRTGRLVFRLLSLVLSLMTVILV | | |
| | | 8563\|Organism: | LVILASWSQKINACATKEGFNSLDLQISGL | | |
| | | Tioman | VKSINSLITEVNQISITTAINLPIKLSDFGKSI | | |
| | | virus\|Strain | VDQVTQMIRQCNAVCKGPGEKPGIQNIRI | | |
| | | Name: | NIPNNFSTYLELNNTVKSIELQRRPALLARP | | |
| | | UNKNOWN- | NPIPKSCSRFPSYSVNFGIHCFAHAITDQSC | | |
| | | NC_004074\| | ELSDKTYYRLAIGISDKNLSDPSDVKYIGE | | |
| | | Protein | AFTPMGLQARGCSVISSIYGCYLLCSKSNQ | | |
| | | Name: | GYEADFQTQGFHQMYILFLSRDLKTTLFN | | |
| | | attachment protein\| | DMISSTTVVWNGLYPGEGAGIWHMGYLIF | | |
| | | Gene Symbol:HN | PLWGGIKIGTPASTSILNSTLDLPLVGPSCK | | |
| | | | STLEENNLINKDVLFSPYFGESVMVFGFLS | | |
| | | | CYMLSNVPTHCQVEVLNSSVLGFGSRSQL | | |
| | | | MDLKGIVYLYIQSAGWYSYTQLFRLSLQS | | |
| | | | RGYKLTVKQIRRIPISSTTRPGTAPCDVVH | | |
| | | | NCPYTCATGLFQAPWIVNGDSILDRDVRN | | |
| | | | LVFVQAWSGNFNTFQKGLISICNQYTCPLT | | |
| | | | TLLDNDNSIMRSTTTYCYPSLSEYNLQCQS | | |
| | | | FIEWGGPVGNPIGILEVHYIIKFK | | |
| NC_005283 | 7091-8905 | gb:NC_005283: | MSSPRDKVDAFYKDIPRPRNNRVLLDNER | 2 | 105 |
| | | 7091- | VIIERPLILVGVLAVMFLSLVGLLAIAGVRL | | |
| | | 8905\|Organism: | QKATTNSIEVNRKLSTNLETTVSIEHHVKD | | |
| | | Dolphin | VLTPLFKIIGDEVGLRMPQKLTEIMQFISNK | | |
| | | morbillivirus\| | IKFLNPDREYDFNDLHWCVNPPDQVKIDY | | |
| | | Strain | AQYCNHIAAEELIVTKFKELMNHSLDMSK | | |
| | | Name: | GRIFPPKNCSGSVITRGQTIKPGLTLVNIYT | | |
| | | UNKNOWN- | TRNFEVSFMVTVISGGMYGKTYFLKPPEP | | |
| | | NC_005283\| | DDPFEFQAFRIFEVGLVRDVGSREPVLQMT | | |
| | | Protein | NFMVIDEDEGLNFCLLSVGELRLAAVCVR | | |
| | | Name: | GRPVVTKDIGGYKDEPFKVVTLGIIGGGLS | | |
| | | haemagglutinin | NQKTEIYPTIDSSIEKLYITSHRGIIRNSKAR | | |
| | | protein\|Gene | WSVPAIRSDDKDKMEKCTQALCKSRPPPS | | |
| | | Symbol:H | CNSSDWEPLTSNRIPAYAYIALEIKEDSGLE | | |
| | | | LDITSNYGPLIIHGAGMDIYEGPSSNQDWL | | |
| | | | AIPPLSQSVLGVINKVDFTAGFDIKPHTLTT | | |
| | | | AVDYESGKCYVPVELSGAKDQDLKLESNL | | |
| | | | VVLPTKDFGYVTATYDTSRSEHAIVYYVY | | |
| | | | DTARSSSYFFPFRIKARGEPIYLRIECFPWS | | |
| | | | RQLWCHHYCMINSTVSNEIVVVDNLVSIN | | |
| | | | MSCSR | | |
| NC_007803 | 7978-12504 | gb:NC_007803: | MSQLAAHNLAMSNFYGTHQGDLSGSQKG | 2 | 106 |
| | | 7978- | EEQQVQGVIRYVSMIVSLLSLFTIIALNVTN | | |
| | | 12504\|Organism: | IIYMTESGGTMQSIKTAQGSIDGSMREISG | | |
| | | Beilong | VIMEDVKPKTDLINSMVSYNIPAQLSMIHQ | | |
| | | virus\|Strain | IIKNDVPKQCTPSFMFNNTICPLAENPTHSR | | |
| | | Name:Li\| | YFEEVNLDSISECSGPDMHLGLGVNPEFIE | | |
| | | Protein | FPSFAPGSTKPGSCVRLPSFSLSTTVFAYTH | | |
| | | Name: | TIMGHGCSELDVGDHYFSVGRIADAGHEIP | | |
| | | attachment | QFETISSWFINDKINRRSCTVAAGAMEAW | | |
| | | glycoprotein\| | MGCVIMTETFYDDRNSLDTGKLTISYLDV | | |
| | | Gene Symbol:G | FGRKKEWIYTRSEILYDYTYTSVYFSVGSG | | |
| | | | VVVGDTVYFLIWGSLSSPIEETAYCFAPDC | | |
| | | | SNYNQRMCNEAQRPSKFGHRQMVNGILK | | |
| | | | FKTTSTGKPLLSVGTLSPSVVPFGSEGRLM | | |
| | | | YSEITKIIYLYLRSTSWHALPLTGLFVLGPP | | |
| | | | TSISWIVQRAVSRPGEFPCGASNRCPKDCV | | |
| | | | TGVYTDLFPLGSRYEYAATVYLNSETYRV | | |
| | | | NPTLALINQTNIIASKKVTTESQRAGYTTTT | | |
| | | | CFVFKLRVWCISVVELAPSTMTAYEPIPFL | | |
| | | | YQLDLTCKGKNGSLAMRFAGKEGTYKSG | | |
| | | | RYKSPRNECFFEKVSNKYYFIVSTPEGIQP | | |
| | | | YEIRDLTPDRMPHIIMYISDVCAPALSAFK | | |
| | | | KLLPAMRPITTLTIGNWQFRPVEVSGGLRV | | |
| | | | NIGRNLTKEGDLTMSAPEDPGSNTFPGNHI | | |
| | | | PGNGILDAGYYTVEYPKE | | |
| NC_009489 | 6559-8512 | gb:NC_009489: | MASLQSEPGSQKPHYQSDDQLVKRTWRSF | 2 | 107 |
| | | 6559- | FRFSVLVVTITSLALSIITLIGVNRISTAKQIS | | |
| | | 8512\|Organism: | NAFAAIQANILSSIPDIRPINSLLNQLVYTSS | | |
| | | Mapuera | VTLPLRISSLESNVLAAIQEACTYRDSQSSC | | |
| | | virus\|Strain | SATMSVMNDQRYIEGIQVYSGSFLDLQKH | | |
| | | Name:BeAnn | TLSPPIAFPSFIPTSTTTVGCTRIPSFSLTKTH | | |
| | | 370284\|Protein | WCYTHNYIKTGCRDATQSNQYIALGTIYT | | |
| | | Name: | DPDGTPGFSTSRSQYLNDGVNRKSCSISAV | | |
| | | attachment protein\| | PMGCALYCFISVKEEVDYYKGTVPPAQTLI | | |
| | | Gene Symbol:HN | LFFFNGTVHEHRIVPSSMNSEWVMLSPGV | | |
| | | | GSGVFYNNYIIFPLYGGMTKDKAEKRGEL | | |
| | | | TRFFTPKNSRSLCKMNDSVFSNAAQSAYY | | |
| | | | PPYFSSRWIRSGLLACNWNQIITTNCEILTF | | |
| | | | SNQVMMMGAEGRLILINDDLFYYQRSTS | | |
| | | | WWPRPLVYKLDIELNYPDSHIQRVDQVEV | | |
| | | | TFPTRPGWGGCVGNNFCPMICVSGVYQD | | |
| | | | VWPVTNPVNTTDSRTLWVGGTLLSNTTRE | | |
| | | | NPASVVTSGGSISQTVSWFNQTVPGAYSTT | | |
| | | | TCFNDQVQGRIFCLIIFEVGGGLLGEYQIVP | | |
| | | | FLKELKYQGAVHA | | |
| NC_017937 | 6334-8544 | gb:NC_017937: | MAPINYPASYYTNNAERPVVITTKSTESKG | 2 | 108 |
| | | 6334- | QRPLPLGNARFWEYFGHVCGTLTFCMSLI | | |
| | | 8544\|Organism: | GIIVGIIALANYSSDKDWKGRIGGDIQVTR | | |
| | | Nariva | MATEKTVKLILEDTTPKLRNILDSVLFQLP | | |
| | | virus\|Strain | KMLASIASKINTQTPPPPTTSGHSTALATQ | | |
| | | Name: | CSSNCENRPEIGYDYLRQVEQSLQRITNISI | | |
| | | UNKNOWN- | QLLEASEIHSMAGAYPNALYKIRTQDSWS | | |
| | | NC_017937\| | VTAKECPLQAFQPNLNLIPAMIGTATGALI | | |
| | | Protein | RNCVRQPVIVVDDGVYMLTYLAMRGSCQ | | |
| | | Name: | DHQKSVRHFEMGVITSDPFGDPVPTPLRH | | |
| | | attachment protein\| | WTKRALPAYDGCALAVKGHAGFALCTET | | |
| | | Gene Symbol:H | SVGPLRDRTAKRKPNIVLFKASLVGELSER | | |
| | | | VIPPQSWLSGFSFFSVYTVAGKGYAYHSKF | | |
| | | | HAFGNVVRVGQSEYQAKCRGTGCPTANQ | | |
| | | | DDCNTAQRVSQEDNTYLHQAILSVDIDSVI | | |
| | | | DPEDVVYVIERDQYYQASAGDLYRVPETG | | |
| | | | EILYNLHNGGWSNEVQVGRIQPSDRFYMR | | |
| | | | EIQLTSTRVPAPNGCNRVKGCPGGCVAVIS | | |
| | | | PAFTPMHPEFNVGVGIFPMNQPHNPSIMH | | |
| | | | VQQQTELFWKPIVGGNITLHESSIACYSTV | | |
| | | | PPNPSYDLCIGVMTLLLHQGQLPQFQALS | | |
| | | | WYQPTMCNGNAPQNRRALIPVIVEDSKA | | |
| | | | MSVSSDAPRTP | | |
| NC_025256 | 9117-11015 | gb:NC_025256: | MPQKTVEFINMNSPLERGVSTLSDKKTLN | 2 | 109 |
| | | 9117- | QSKITKQGYFGLGSHSERNWKKQKNQND | | |
| | | 11015\|Organism: | HYMTVSTMILEILVVLGIMFNLIVLTMVYY | | |
| | | Bat | QNDNINQRMAELTSNITVLNLNLNQLTNKI | | |
| | | Paramyxovirus | QREIIPRITLIDTATTITIPSAITYILATLTTRI | | |
| | | Eid_hel/GH- | SELLPSINQKCEFKTPTLVLNDCRINCTPPL | | |
| | | M74a/GHA/2009 | NPSDGVKMSSLATNLVAHGPSPCRNFSSV | | |
| | | \|Strain | PTIYYYRIPGLYNRTALDERCILNPRLTISST | | |
| | | Name:BatPV/ | KFAYVHSEYDKNCTRGFKYYELMTFGEIL | | |
| | | Eid_hel/GH- | EGPEKEPRMFSRSFYSPTNAVNYHSCTPIV | | |
| | | M74a/GHA/2009 | TVNEGYFLCLECTSSDPLYKANLSNSTFHL | | |
| | | \|Protein | VILRHNKDEKIVSMPSFNLSTDQEYVQIIPA | | |
| | | Name: | EGGGTAESGNLYFPCIGRLLHKRVTHPLC | | |
| | | glycoprotein\|Gene | KKSNCSRTDDESCLKSYYNQGSPQHQVVN | | |
| | | Symbol:G | CLIRIRNAQRDNPTWDVITVDLTNTYPGSR | | |
| | | | SRIFGSFSKPMLYQSSVSWHTLLQVAEITD | | |
| | | | LDKYQLDWLDTPYISRPGGSECPFGNYCP | | |
| | | | TVCWEGTYNDVYSLTPNNDLFVTVYLKSE | | |
| | | | QVAENPYFAIFSRDQILKEFPLDAWISSART | | |
| | | | TTISCFMFNNEIWCIAALEITRLNDDIIRPIY | | |
| | | | YSFWLPTDCRTPYPHTGKWITRVPLRSTYN | | |
| | | | Y | | |
| NC_025347 | 6398-8418 | gb:NC_025347: | MESIGKGTWRTVYRVLTILLDVVIIILSVIA | 2 | 110 |
| | | 6398- | LISLGLKPGERIINEVNGSIHNQLVPLSGITS | | |
| | | 8418\|Organism: | DIQAKVSSIYRSNLLSIPLQLDQINQAISSSA | | |
| | | Avian | RQIADTINSFLALNGSGTFIYTNSPEFANGF | | |
| | | paramyxovirus | NRAMFPTLNQSLNMLTPGNLIEFTNFIPTPT | | |
| | | 7\|Strain | TKSGCIRIPSFSMSSSHWCYTHNIIASGCQD | | |
| | | Name:APMV- | HSTSSEYISMGVVEVTDQAYPNFRTTLSIT | | |
| | | 7/dove/Tennessee/ | LADNLNRKSCSIAATGFGCDILCSVVTETE | | |
| | | 4/75\|Protein | NDDYQSPEPTQMIYGRLFFNGTYSEMSLN | | |
| | | Name: | VNQMFADWVANYPAVGSGVELADFVIFP | | |
| | | hemagglutinin- | LYGGVKITSTLGASLSQYYYIPKVPTVNCS | | |
| | | neuraminidase\| | ETDAQQIEKAKASYSPPKVAPNIWAQAVV | | |
| | | Gene | RCNKSVNLANSCEILTFNTSTMMMGAEGR | | |
| | | Symbol:HN | LLMIGKNVYFYQRSSSYWPVGIIYKLDLQE | | |
| | | | LTTFSSNQLLSTIPIPFEKFPRPASTAGVCSK | | |
| | | | PNVCPAVCQTGVYQDLWVLYDLGKLENT | | |
| | | | TAVGLYLNSAVGRMNPFIGIANTLSWYNT | | |
| | | | TRLFAQGTPASYSTTTCFKNTKIDTAYCLSI | | |
| | | | LELSDSLLGSWRITPLLYNITLSIMS | | |
| NC_025348 | 6590-8548 | gb:NC_025348: | MPPVPTVSQSIDEGSFTDIPLSPDDIKHPLS | 2 | 111 |
| | | 6590- | KKTCRKLFRIVTLIGVGLISILTIISLAQQTGI | | |
| | | 8548\|Organism: | LRKVDSSDFQSYVQESFKQVLNLMKQFSS | | |
| | | Tuhoko virus | NLNSLIEITSVTLPFRIDQFGTDIKTQVAQL | | |
| | | 2\|Strain | VRQCNAVCRGPIKGPTTQNIVYPALYETSL | | |
| | | Name: | NKTLETKNVRIQEVRQEVDPVPGPGLSNG | | |
| | | UNKNOWN- | CTRNPSFSVYHGVWCYTHATSIGNCNGSL | | |
| | | NC_025348\| | GTSQLFRIGNVLEGDGGAPYHKSLATHLL | | |
| | | Protein | TTRNVSRQCSATASYYGCYFICSEPVLTER | | |
| | | Name: | DDYETPGIEPITIFRLDPDGNWVVFPNINRF | | |
| | | hemagglutinin- | TEYSLKALYPGIGSGVLFQGKLIFPMYGGI | | |
| | | neuraminidase\| | DKERLSALGLGNIGLIERRMADTCNHTEK | | |
| | | Gene | ELGRSFPGAFSSPYYHDAVMLNFLLICEMI | | |
| | | Symbol:HN | ENLPGDCDLQILNPTNMSMGSESQLSVLD | | |
| | | | NELFLYQRSASWWPYTLIYRLNMRYTGK | | |
| | | | YLKPKSIIPMVIKSNTRPGYEGCNHERVCP | | |
| | | | KVCVTGVFQAPWILSIGRDHKERVSNVTY | | |
| | | | MVAWSMDKSDRTYPAVSVCGSDTCKLTV | | |
| | | | PLGDSKVHSAYSVTRCYLSRDHMSAYCLV | | |
| | | | IFELDARPWAEMRIQSFLYKLILT | | |
| NC_025350 | 6451-8341 | gb:NC_025350: | MHNRTQSVSSIDTSSDVYLPRRKKAVTKF | 2 | 112 |
| | | 6451- | TFKKIFRVLILTLLLSIIIIIAVIFPKIDHIRETC | | |
| | | 8341\|Organism: | DNSQILETITNQNSEIKNLINSAITNLNVLLT | | |
| | | Tuhoko virus | STTVDLPIKLNNFGKSIVDQVTMMVRQCN | | |
| | | 3\|Strain | AVCRGPGDRPTQNIELFKGLYHTSPPSNTS | | |
| | | Name: | TKLSMITEASNPDDIVPRPGKLLGCTRFPSF | | |
| | | UNKNOWN- | SVHYGLWCYGHMASTGNCSGSSPSVQIIRI | | |
| | | NC_025350\| | GSIGTNKDGTPKYVIIASASLPETTRLYHCS | | |
| | | Protein | VTMTSIGCYILCTTPSVSETDDYSTMGIEK | | |
| | | Name: | MSISFLSLDGYLTQLGQPTGLDNQNLYAL | | |
| | | hemagglutinin- | YPGPGSGVIFRDFLIFPMMGGIRLMDAQK | | |
| | | neuraminidase\| | MLNRNITYRGFPPSETCTESELKLKQEVAN | | |
| | | Gene | MLTSPYYGEVLVLNFLYVCSLLDNIPGDCS | | |
| | | Symbol:HN | VQLIPPDNMTLGAESRLYVLNGSLIMYKR | | |
| | | | GSSWWPYTELYQINYRVNNRAFRVRESVR | | |
| | | | INTTSTSRPGVQGCNLEKVCPKVCVSGIYQ | | |
| | | | SPGIISAPVNPTRQEEGLLYFLVWTSSMSSR | | |
| | | | TGPLSSLCDHSTCRITYPIGDDTIFIGYTDSS | | |
| | | | CFMSSIKEGIYCIAFLELDNQPYSMMAIRSL | | |
| | | | SYIIN | | |
| NC_025352 | 8716-11257 | gb:NC_025352: | MATNRDNTITSAEVSQEDKVKKYYGVET | 2 | 113 |
| | | 8716- | AEKVADSISGNKVFILMNTLLILTGAIITITL | | |
| | | 11257\|Organism: | NITNLTAAKSQQNMLKIIQDDVNAKLEMF | | |
| | | Mojiang | VNLDQLVKGEIKPKVSLINTAVSVSIPGQIS | | |
| | | virus\|Strain | NLQTKFLQKYVYLEESITKQCTCNPLSGIF | | |
| | | Name:Tongguan1 | PTSGPTYPPTDKPDDDTTDDDKVDTTIKPI | | |
| | | \|Protein | EYPKPDGCNRTGDHFTMEPGANFYTVPNL | | |
| | | Name: | GPASSNSDECYTNPSFSIGSSIYMFSQEIRK | | |
| | | attachment | TDCTAGEILSIQIVLGRIVDKGQQGPQASPL | | |
| | | glycoprotein\| | LVWAVPNPKIINSCAVAAGDEMGWVLCS | | |
| | | Gene Symbol:G | VTLTAASGEPIPHMFDGFWLYKLEPDTEV | | |
| | | | VSYRITGYAYLLDKQYDSVFIGKGGGIQK | | |
| | | | GNDLYFQMYGLSRNRQSFKALCEHGSCL | | |
| | | | GTGGGGYQVLCDRAVMSFGSEESLITNAY | | |
| | | | LKVNDLASGKPVIIGQTFPPSDSYKGSNGR | | |
| | | | MYTIGDKYGLYLAPSSWNRYLRFGITPDIS | | |
| | | | VRSTTWLKSQDPIMKILSTCTNTDRDMCP | | |
| | | | EICNTRGYQDIFPLSEDSEYYTYIGITPNNG | | |
| | | | GTKNFVAVRDSDGHIASIDILQNYYSITSA | | |
| | | | TISCFMYKDEIWCIAITEGKKQKDNPQRIY | | |
| | | | AHSYKIRQMCYNMKSATVTVGNAKNITIR | | |
| | | | RY | | |
| NC_025363 | 6503-8347 | gb:NC_025363: | MESATSQVSFENDKTSDRRTWRAVFRVL | 2 | 114 |
| | | 6503- | MIILALSSLCVTVAALIYSAKAAIPGNIDAS | | |
| | | 8347\|Organism: | EQRILSSVEAVQVPVSRLEDTSQKIYRQVIL | | |
| | | Avian | EAPVTQLNMETNILNAITSLSYQIDASANS | | |
| | | paramyxovirus | SGCGAPVHDSDFTGGVGRELLQEAEVNLT | | |
| | | 12\|Strain | IIRPSKFLEHLNFIPAPTTGNGCTRIPSFDLG | | |
| | | Name:Wigeon/ | QTHWCYTHNVVLNGCRDRGHSFQYVALG | | |
| | | Italy/3920_1/ | ILRTSATGSVFLSTLRSVNLDDDRNRKSCS | | |
| | | 2005\|Protein | VSATPIGCEMLCSLVTETEEGDYDSIDPTP | | |
| | | Name: | MVHGRLGFDGKYREVDLSEKEIFADWRA | | |
| | | hemagglutinin- | NYPAVGGGAFFGNRVWFPVYGGLKEGTQ | | |
| | | neuraminidase\| | SERDAEKGYAIYKRFNNTCPDDNTTQIAN | | |
| | | Gene | AKASYRPSRFGGRFIQQGILSFKVEGNLGS | | |
| | | Symbol:HN | DPILSLTDNSITLMGAEARVMNIENKLYLY | | |
| | | | QRGTSWFPSALVYPLDVANTAVKVRAPYI | | |
| | | | FDKFTRPGGHPCSASSRCPNVCVTGVYTD | | |
| | | | AYPLVFSRSHDIVAVYGMQLAAGTARLDP | | |
| | | | QAAIWYGNEMSTPTKVSSSTTKAAYTTST | | |
| | | | CFKVTKTKRIYCISIAEIGNTLFGEFRIVPLL | | |
| | | | IEVQKTPLTRRSELRQQMPQPPIDLVIDNPF | | |
| | | | CAPSGNLSRKNAIDEYANSWP | | |
| NC_025373 | 6619-8605 | gb:NC_025373: | MEPTGSKVDIVPSQGTKRTCRTFYRLLILIL | 2 | 115 |
| | | 6619- | NLIIIILTIISIYVSISTDQHKLCNNEADSLLH | | |
| | | 8605\|Organism: | SIVEPITVPLGTDSDVEDELREIRRDTGINIP | | |
| | | Avian | IQIDNTENIILTTLASINSNIARLHNATDESP | | |
| | | paramyxovirus | TCLSPVNDPRFIAGINKITKGSMIYRNFSNL | | |
| | | 3\|Strain | IEHVNFIPSPTTLSGCTRIPSFSLSKTHWCYS | | |
| | | Name:turkey/ | HNVISTGCQDHAASSQYISIGIVDTGLNNE | | |
| | | Wisconsin/68\| | PYLRTMSSRLLNDGLNRKSCSVTAGAGVC | | |
| | | Protein | WLLCSVVTESESADYRSRAPTAMILGRFN | | |
| | | Name: | FYGDYTESPVPASLFSGRFTANYPGVGSGT | | |
| | | hemagglutinin\|Gene | QLNGTLYFPIYGGVVNDSDIELSNRGKSFR | | |
| | | Symbol:HN | PRNPTNPCPDPEVTQSQRAQASYYPTRFGR | | |
| | | | LLIQQAILACRISDTTCTDYYLLYFDNNQV | | |
| | | | MMGAEARIYYLNNQMYLYQRSSSWWPH | | |
| | | | PLFYRFSLPHCEPMSVCMITDTHLILTYATS | | |
| | | | RPGTSICTGASRCPNNCVDGVYTDVWPLT | | |
| | | | EGTTQDPDSYYTVFLNSPNRRISPTISIYSY | | |
| | | | NQKISSRLAVGSEIGAAYTTSTCFSRTDTG | | |
| | | | ALYCITIIEAVNTIFGQYRIVPILVQLISD | | |
| NC_025386 | 7541-9403 | gb:NC_025386: | MKAMHYYKNDFADPGTNDNSSDLTTNPFI | 2 | 116 |
| | | 7541- | SNQIKSNLSPPVLAEGHLSPSPIPKFRKILLT | | |
| | | 9403\|Organism: | ISFVSTIVVLTVILLVLTIRILTIIEASAGDEK | | |
| | | Salem | DIHTILSSLLNTFMNEYIPVFKNLVSIISLQIP | | |
| | | virus\|Strain | QMLIDLKTSSTQMMQSLKTFPRDLETLST | | |
| | | Name: | VTQSVAVLLEKAKSTIPDINKFYKNVGKV | | |
| | | UNKNOWN- | TFNDPNIKVLTLEVPAWLPIVRQCLKQDFR | | |
| | | NC_025386\| | QVISNSTGFALIGALPSQLFNEFEGYPSLAI | | |
| | | Protein | VSEVYAITYLKGVMFENQENFLYQYFEIG | | |
| | | Name: | TISPDGYNKPYFLRHTSVMLSTFKLSGKCT | | |
| | | attachment | AAVDYRGGIFLCTPSPKIPKILQNPPDLPTL | | |
| | | glycoprotein\| | TVVSIPFDGRYTIRNISLMLTDEADIIYDLD | | |
| | | Gene Symbol:G | TLQGRGVLQAMRFYALVRVISSSSPRHFPF | | |
| | | | CKNSWCPTADDKICDQSRRLGADGNYPV | | |
| | | | MYGLISIPAHSSYQGNVSLKLIDPKYYAYT | | |
| | | | RDASLFYNSMTDTYHYSFGTRGWVSRPII | | |
| | | | GELLLGDDIVLTRYTVRSVSRATAGDCTT | | |
| | | | VSMCPQACSGGMNSIFYPLNFDKPQVTGV | | |
| | | | AIRQYERQQEGIIVVTMNDHYYYSVPIIKN | | |
| | | | GTLLISSVTDCFWLMGDLWCMSLMEKNN | | |
| | | | LPLGVRSLAHLTWNIHWSCS | | |
| NC_025390 | 6647-8386 | gb:NC_025390: | MESGISQASLVNDNIELRNTWRTAFRVVS | 2 | 117 |
| | | 6647- | LLLGFTSLVLTACALHFALNAATPADLSSI | | |
| | | 8386\|Organism: | PVAVDQSHHEILQTLSLMSDIGNKIYKQVA | | |
| | | Avian | LDSPVALLNTESTLMSAITSLSYQINNAAN | | |
| | | paramyxovirus | NSGCGAPVHDKDFINGVAKELFVGSQYNA | | |
| | | 9\|Strain | SNYRPSRFLEHLNFIPAPTTGKGCTRIPSFD | | |
| | | Name:duck/ | LAATHWCYTHNVILNGCNDHAQSYQYISL | | |
| | | New | GILKVSATGNVFLSTLRSINLDDDENRKSC | | |
| | | York/22/1978\| | SISATPLGCDLLCAKVTEREEADYNSDAAT | | |
| | | Protein | RLVHGRLGFDGVYHEQALPVESLFSDWV | | |
| | | Name: | ANYPSVGGGSYFDNRVWFGVYGGIRPGS | | |
| | | hemagglutinin- | QTDLLQSEKYAIYRRYNNTCPDNNPTQIER | | |
| | | neuraminidase\| | AKSSYRPQRFGQRLVQQAILSIRVEPSLGN | | |
| | | Gene | DPKLSVLDNTVVLMGAEARIMTFGHVAL | | |
| | | Symbol:HN | MYQRGSSYFPSALLYPLSLTNGSAAASKPF | | |
| | | | IFEQYTRPGSPPCQATARCPNSCVTGVYTD | | |
| | | | AYPLFWSEDHKVNGVYGMMLDDITSRLN | | |
| | | | PVAAIFDRYGRSRVTRVSSSSTKAAYTTNT | | |
| | | | CFKVVKTKRVYCLSIAEIENTLFGEFRITPL | | |
| | | | LSEIIFDPNLEPSDTSRN | | |
| NC_025403 | 6692-8645 | gb:NC_025403: | MATNLSTITNGKFSQNSDEGSLTELPFFEH | 2 | 118 |
| | | 6692- | NRKVATTKRTCRFVFRSVITLCNLTILIVTV | | |
| | | 8645\|Organism: | VVLFQQAGFIKRTESNQVCETLQNDMHGV | | |
| | | Achimota | VTMSKGVITTLNNLIEITSVNLPFQMKQFG | | |
| | | virus 1\|Strain | QGIVTQVTQMVRQCNAVCKGPTIGPDIQNI | | |
| | | Name: | VYPASYESMIKHPVNNSNILLSEIRQPLNFV | | |
| | | UNKNOWN- | PNTGKLNGCTRTPSFSVYNGFWCYTHAES | | |
| | | NC_025403\| | DWNCNGSSPYMQVFRVGVVTSDYDYNVI | | |
| | | oPrtein | HKTLHTKTSRLANVTYQCSTISTGYECYFL | | |
| | | Name: | CSTPNVDEITDYKTPGIESLQIYKIDNRGTF | | |
| | | attachment protein\| | AKFPITDQLNKELLTALYPGPGNGVLYQG | | |
| | | Gene Symbol:HN | RLLFPMHGGMQSSELNKVNLNNTVLSQFN | | |
| | | | DNKGCNATEIKLESEFPGTFTSPYYSNQVM | | |
| | | | LNYILICEMIENLPGNCDLQIVAPKNMSMG | | |
| | | | SESQLYSINNKLYLYQRSSSRWPYPLIYEV | | |
| | | | GTRLTNRQFRLRAINRFLIKSTTRPGSEGC | | |
| | | | NIYRVCPKVCVTGVYQAPWILHVSKAGSQ | | |
| | | | SIAKVLYAVAWSKDHMSRKGPLFSICDND | | |
| | | | TCFLTKSLASEHVHSGYSITRCYLENSERHI | | |
| | | | ICVVIMELDASPWAEMRIQSVIYNITLPS | | |
| NC_025404 | 6655-8586 | gb:NC_025404: | MDNSMSISTISLDAQPRIWSRHESRRTWRN | 2 | 119 |
| | | 6655- | IFRITSLVLLGVTVIICIWLCCEVARESELEL | | |
| | | 8586\|Organism: | LASPLGALIMAINTIKSSVVKMTTELNQVT | | |
| | | Achimota | FTTSIILPNKVDQFGQNVVSQVAQLVKQC | | |
| | | virus 2\|Strain | NAVCRGHQDTPELEQFINQKNPTWILQPN | | |
| | | Name: | YTTKLTNLHEIDSIIPLVDYPGFSKSCTRFPS | | |
| | | UNKNOWN- | FSEGSKFWCFTYAVVKEPCSDISSSIQVVK | | |
| | | NC_025404\| | YGAIKANHSDGNPYLVLGTKVLDDGKFR | | |
| | | Protein | RGCSITSSLYGCYLLCSTANVSEVNDYAHT | | |
| | | Name: | PAYPLTLELISKDGITTDLSPTYTVQLDKW | | |
| | | attachment protein\| | SALYPGIGSGVIFKGYLMFPVYGGLPFKSP | | |
| | | Gene Symbol:HN | LISASWVGPGNKWPVDFSCSEDQYSTFNF | | |
| | | | SNPYSALYSPHFSNNIVVSALFVCPLNENL | | |
| | | | PYSCEVQVLPQGNLTIGAEGRLYVIDQDL | | |
| | | | YYYQRSTSWWPYLQLYKLNIRITNRVFRV | | |
| | | | RSLSLLPIKSTTRPGYGNCTYFKLCPHICVT | | |
| | | | GVYQSPWLISIRDKRPHEEKNILYFIGWSP | | |
| | | | DEQIRQNPLVSLCHETACFINRSLATNKTH | | |
| | | | AGYSESHCVQSFERNKLTCTVFYELTAKP | | |
| | | | WAEMRVQSLLFQVDFL | | |
| NC_025410 | 6799-8869 | gb:NC_025410: | MDSRSDSFTDIPLDNRIERTVTSKKTWRSIF | 2 | 120 |
| | | 6799- | RVTAIILLIICVVVSSISLNQHNDAPLNGAG | | |
| | | 8869\|Organism: | NQATSGFMDAIKSLEKLMSQTINELNQVV | | |
| | | Tuhoko virus | MTTSVQLPNRITKFGQDILDQVTQMVRQC | | |
| | | 1\|Strain | NAVCRGPGVGPSIQNYVIQGHAPTVSFDPI | | |
| | | Name: | SAEYQKFVFGITEKTLITAYHNPWECLRFP | | |
| | | UNKNOWN- | SQHLFDTTWCVSYQILTQNCSDHGPRITVI | | |
| | | NC_025410\| | QLGEIMIANNLSTVFRDPVIKYIRHHIWLRS | | |
| | | Protein | CSVVAYYSQCTIFCTSTNKSEPSDYADTGY | | |
| | | Name: | EQLFLATLQSDGTFTEHSMHGVNIVHQWN | | |
| | | hemagglutinin- | AIYGGVGNGVIIGRNMLIPLYGGINYYDHN | | |
| | | neuraminidase\| | TTIVQTVDLRPYPIPDSCSQTDNYQTNYLP | | |
| | | Gene | SMFTNSYYGTNLVVSGYLSCRLMAGTPTS | | |
| | | Symbol:HN | CSIRVIPIENMTMGSEGQFYLINNQLYYYK | | |
| | | | RSSNWIRDTQVYLLSYSDKGNIIEITSAERY | | |
| | | | IFKSVTSPDEGDCVTNHGCPSNCIGGLFQA | | |
| | | | PWILNDFKLCGSNITCPKIVTVWADQPDK | | |
| | | | RSNPMLSIAETDKLLLHKSYINYHTAVGYS | | |
| | | | TVLCFDSPKLNLKTCVVLQELMSDDKLLI | | |
| | | | RISYSIVSIMVE | | |
| NC_028249 | 7059-9010 | gb:NC_028249: | MFSHQDKVGAFYKNNARANSSKLSLVTD | 2 | 121 |
| | | 7059- | EVEERRSPWFLSILLILLVGILILLAITGIRFH | | |
| | | 9010\|Organism: | QVVKSNLEFNKLLIEDMEKTKAVHHQVK | | |
| | | Phocine | DVLTPLFKIIGDEVGLRLPQKLNEIKQFIVQ | | |
| | | distemper | KTNFFNPNREFDFRELHWCINPPSKVKVNF | | |
| | | virus\|Strain | TQYCEITEFKEATRSVANSILLLTLYRGRD | | |
| | | Name:PDV/ | DIFPPYKCRGATTSMGNVFPLAVSLSMSLI | | |
| | | Wadden_Sea.NLD/ | SKPSEVINMLTAISEGIYGKTYLLVTDDTE | | |
| | | 1988\|Protein | ENFETPEIRVFEIGFINRWLGDMPLFQTTN | | |
| | | Name: | YRIISNNSNTKICTIAVGELALASLCTKESTI | | |
| | | hemagglutinin | LLNLGDEESQNSVLVVILGLFGATHMDQL | | |
| | | protein\|Gene | EEVIPVAHPSIEKIHITNHRGFIKDSVATWM | | |
| | | Symbol:H | VPALALSEQGEQINCLRSACKRRTYPMCN | | |
| | | | QTSWEPFGDKRLPSYGRLTLSLDVSTDLSI | | |
| | | | NVSVAQGPIIFNGDGMDYYEGTLLNSGWL | | |
| | | | TIPPKNGTILGLINQASKGDQFIVTPHILTFA | | |
| | | | PRESSTDCHLPIQTYQIQDDDVLLESNLVV | | |
| | | | LPTQSFEYVVATYDVSRSDHAIVYYVYDP | | |
| | | | ARTVSYTYPFRLRTKGRPDILRIECFVWDG | | |
| | | | HLWCHQFYRFQLDATNSTSVVENLIRIRFS | | |
| | | | CDRLDP | | |
| NC_028362 | 6951-8675 | gb:NC_028362: | MEYWGHTNNPDKINRKVGVDQVRDRSKT | 2 | 122 |
| | | 6951- | LKIITFIISMMTSIMSTVALILILIMFIQNNNN | | |
| | | 8675\|Organism: | NRIILQELRDETDAIEARIQKASNDIGVSIQS | | |
| | | Caprine | GINTRLLTIQNHVQNYIPLALTQQVSSLRES | | |
| | | parainfluenza | INDVITKREETQSKMPIQRMTHDDGIEPLIP | | |
| | | virus 3\|Strain | DNFWKCPSGIPTISASPKIRLIPGPGLLATST | | |
| | | Name:JS2013\| | TINGCIRLPSLVINNLIYAYTSNLITQGCQDI | | |
| | | Protein | GKSYQVLQIGIITINSDLVPDLNPRITHTFDI | | |
| | | Name: | DDNRKSCSLALRNADVYQLCSTPKVDERS | | |
| | | hemagglutinin- | DYSSIGIEDIVLDIVTSEGTVSTTRFTNNNIT | | |
| | | neuraminidase\| | FDKPYAALYPSVGPGIYYDNKIIFLGYGGL | | |
| | | Gene | EHEENGDVICNITGCPGKTQHDCNQASYS | | |
| | | Symbol:HN | PWFSNRRMVNAIILVNKGLNKVPSLQVWT | | |
| | | | IPMRQNYWGSEGRLLLLGNKIYIYTRSTS | | |
| | | | WHSKLQLGTLDISNYNDIRIRWTHHDVLS | | |
| | | | RPGSEECPWGNTCPRGCITGVYNDAYPLN | | |
| | | | PSGSVVSSVILDSRTSRENPIITYSTDTSRVN | | |
| | | | ELAIRNNTLSAAYTTTNCVTHYGKGYCFH | | |
| | | | IIEINHKSLNTLQPMLFKTEIPKSCN | | |
| AB548428 | 5999-7261 | gb:AB548428: | MGSELYIIEGVSSSEIVLKQVLRRSKKILLG | 1 | 123 |
| | | 5999- | LVLSALGLTLTSTIVISICISVEQVKLRQCV | | |
| | | 7261\|Organism: | DTYWAENGSLHPGQSTENTSTRGKTTTKD | | |
| | | Avian | PRRLQATGAGKFESCGYVQVVDGDMHDR | | |
| | | metapneumovirus | SYAVLGGVDCLGLLALCESGPICQGDTWS | | |
| | | \|Strain | EDGNFCRCTFSSHGVSCCKKPKSKATTAQ | | |
| | | Name:VCO3/ | RNSKPANSKSTPPVHSDRASKEHNPSQGE | | |
| | | 60616\|Protein | QPRRGPTSSKTTIASTPSTEDTAKPTISKPK | | |
| | | Name: | LTIRPSQRGPSGSTKAASSTPSHKTNTRGTS | | |
| | | attachment | KTTDQRPRTGPTPERPRQTHSTATPPPTTPI | | |
| | | glycoprotein\| | HKGRAPTPKPTTDLKVNPREGSTSPTAIQK | | |
| | | Gene Symbol:G | NPTTQSNLVDCTLSDPDEPQRICYQVGTY | | |
| | | | NPSQSGTCNIEVPKCSTYGHACMATLYDT | | |
| | | | PFNCWRRTRRCICDSGGELIEWCCTSQ | | |
| AF079780 | 8118-10115 | gb:AF079780\| | MDYHSHTTQTGSNETLYQDPLQSQSGSRD | 1 | 124 |
| | | Organism: | TLDGPPSTLQHYSNPPPYSEEDQGIDGPQR | | |
| | | Tupaia | SQPLSTPHQYDRYYGVNIQHTRVYNHLGT | | |
| | | paramyxovirus1 | IYKGLKLAFQILGWVSVIITMIITVTTLKKM | | |
| | | Strain | SDGNSQDSAMLKSLDENFDAIQEVANLLD | | |
| | | Name: | NEVRPKLGVTMTQTTFQLPKELSEIKRYLL | | |
| | | UNKNOWN- | RLERNCPVCGTEATPQGSKGNASGDTAFC | | |
| | | AF079780\| | PPCLTRQCSEDSTHDQGPGVEGTSRNHKG | | |
| | | Protein | KINFPHILQSDDCGRSDNLIVYSINLVPGLS | | |
| | | Name: | FIQLPSGTKHCIIDVSYTFSDTLAGYLIVGG | | |
| | | hemagglutinin\|Gene | VDGCQLHNKAIIYLSLGYYKTKMIYPPDYI | | |
| | | Symbol:H | AIATYTYDLVPNLRDCSIAVNQTSLAAICT | | |
| | | | SKKTKENQDFSTSGVHPFYIFTLNTDGIFT | | |
| | | | VTVIEQSQLKLDYQYAALYPATGPGIFIGD | | |
| | | | HLVFLMWGGLMTKAEGDAYCQASGCND | | |
| | | | AHRTSCNIAQMPSAYGHRQLVNGLLMLPI | | |
| | | | KELGSHLIQPSLETISPKINWAGGHGRLYY | | |
| | | | NWEINTTYIYIEGKTWRSRPNLGIISWSKPL | | |
| | | | SIRWIDHSVARRPGARPCDSANDCPEDCL | | |
| | | | VGGYYDMFPMSSDYKTAITIIPTHHQWPSS | | |
| | | | PALKLFNTNREVRVVMILRPPNNVKKTTIS | | |
| | | | CIRIMQTNWCLGFIIFKEGNNAWGQIYSYI | | |
| | | | YQVESTCPNTK | | |
| AY590688 | 6138-7935 | gb:AY590688: | MEVKVENVGKSQELKVKVKNFIKRSDCK | 1 | 125 |
| | | 6138- | KKLFALILGLVSFELTMNIMLSVMYVESNE | | |
| | | 7935\|Organism: | ALSLCRIQGTPAPRDNKTNTENATKETTLH | | |
| | | Avian | TTTTTRDPEVRETKTTKPQANEGATNPSR | | |
| | | metapneumovirus | NLTTKGDKHQTTRATTEAELEKQSKQTTE | | |
| | | \|Strain | PGTSTQKHTPTRPSSKSPTTTQAIAQLTTPT | | |
| | | Name:Colorado | TPKASTAPKNRQATTKKTETDTTTASRAR | | |
| | | \|Protein | NTNNPTETATTTPKATTETGKSKEGPTQHT | | |
| | | Name: | TKEQPETTAGETTTPQPRRTASRPAPTTKIE | | |
| | | nattachmet | EEAETTKTRTTKSTQTSTGPPRPTGGAPSG | | |
| | | glycoprotein\| | AATEGSGRAAAAGGPSAASAGGRRRTEA | | |
| | | Gene Symbol:G | AAERDRRTRAGAGPTAGGARARTAAASE | | |
| | | | RGADTAGSAGGGPGGDGATGGLSGGAPA | | |
| | | | EREDASGGTAAAGPGDGTEADGRAPPAA | | |
| | | | ALAGRTTESAAGAAGDSGRAGTAGWGSA | | |
| | | | ADGRSTGGNAAAEAGAAQSGRAAPRQPS | | |
| | | | GGTAPESTAPPNSGGSGRADAAPTEEVGV | | |
| | | | GSGLWRGRYVCGPCGESVPEHPMNPCFG | | |
| | | | DGTAWICSDDGGSLPAGCYDGGTDGVVC | | |
| | | | CGVCGGNSCCCGRVECTCGGGAGLLSCC | | |
| | | | CGSYSWS | | |
| EU403085 | 6620-8593 | gb:EU403085: | MESPPSGKDAPAFREPKRTCRLCYRATTLS | 1 | 126 |
| | | 6620- | LNLTIVVLSIISIYVSTQTGANNSCVNPTIVT | | |
| | | 8593\|Organism: | PDYLTGSTTGSVEDLADLESQLREIRRDTG | | |
| | | Avian | INLPVQIDNTENLILTTLASINSNLRFLQNA | | |
| | | paramyxovirus | TTESQTCLSPVNDPRFVAGINRIPAGSMAY | | |
| | | 3\|Strain | NDFSNLIEHVNFIPSPTTLSGCTRIPSFSLSK | | |
| | | Name:APMV3/ | THWCYTHNVISNGCLDHAASSQYISIGIVD | | |
| | | PKT/Netherland/ | TGLNNEPYFRTMSSKSLNDGLNRKSCSVT | | |
| | | 449/75\| | AAANACWLLCSVVTEYEAADYRSRTPTA | | |
| | | Protein | MVLGRFDFNGEYTEIAVPSSLFDGRFASNY | | |
| | | Name: | PGVGSGTQVNGTLYFPLYGGVLNGSDIET | | |
| | | hemagglutinin- | ANKGKSFRPQNPKNRCPDSEAIQSFRAQDS | | |
| | | neuraminidase | YYPTRFGKVLIQQAIIACRISNKSCTDFYLL | | |
| | | protein\|Gene | YFDNNRVMMGAEARLYYLNNQLYLYQR | | |
| | | Symbol:HN | SSSWWPHPLFYSISLPSCQALAVCQITEAH | | |
| | | | LTLTYATSRPGMSICTGASRCPNNCVDGV | | |
| | | | YTDVWPLTKNDAQDPNLFYTVYLNNSTR | | |
| | | | RISPTISLYTYDRRIKSKLAVGSDIGAAYTT | | |
| | | | STCFGRSDTGAVYCLTIMETVNTIFGQYRI | | |
| | | | VPILLRVTSR | | |
| FJ977568 | 6139-7936 | gb:FJ977568: | MEVKVENVGKSQELKVKVKNFIKRSDCK | 1 | 127 |
| | | 6139- | KKLFALILGLVSFELTMNIMLSVMYVESNE | | |
| | | 7936\|Organism: | ALSLCRIQGTPAPRDNKTNTENATKETTLH | | |
| | | Avian | TTTTTRDPEVRETKTTKPQANEGATNPSR | | |
| | | metapneumovirus | NLTTKGDKHQTTRATTEAELEKQSKQTTE | | |
| | | \|Strain | PGTSTQKHTPARPSSKSPTTTQATAQPTTP | | |
| | | Name:aMPV/ | TAPKASTAPKNRQATTKKTETDTTTASRA | | |
| | | MN/turkey/2a/ | RNTNNPTETATTTPKATTETGKGKEGPTQ | | |
| | | 97\|Protein | HTTKEQPETTARETTTPQPRRTASRPAPTT | | |
| | | Name: | KIEEEAETTKTRTTKNTQTSTGPPRPTRSTP | | |
| | | attachment | SKTATENNKRTTTTKRPNTASTDSRQQTR | | |
| | | glycoprotein\| | TTAEQDQQTQTRAKPTTNGAHPQTTTTPE | | |
| | | Gene Symbol:G | HNTDTTNSTKGSPKEDKTTRDPSSKTPTEQ | | |
| | | | EDASKGTAAANPGGSAEADRRAPPATTPT | | |
| | | | GRTTESAAGTTGDDSGAETTRRRSAADRR | | |
| | | | PTGGSTAAEAGTAQSGRATPKQPSGGTAA | | |
| | | | GNTAPPNNESSGRADAAPAEEAGVGPSIR | | |
| | | | RGRHACGPRRESAPEHPTNPCPGDGTAWT | | |
| | | | RSDGGGNLPAGRHDSGADGAARRGARGG | | |
| | | | NPRRRGRAERTRGGGAGPPSCRCGSHNRS | | |
| HG934339 | 5997-7166 | gb:HG934339: | MGAKLYAISGASDAQLMKKTCAKLLEKV | 1 | 128 |
| | | 5997- | VPIIILAVLGITGTTTIALSISISIERAVLSDCT | | |
| | | 7166\|Organism: | TQLRNGTTSGSLSNPTRSTTSTAVTTRDIR | | |
| | | Avian | GLQTTRTRELKSCSNVQIAYGYLHDSSNP | | |
| | | metapneumovirus | VLDSIGCLGLLALCESGPFCQRNYNPRDRP | | |
| | | type | KCRCTLRGKDISCCKEPPTAVTTSKTTPWG | | |
| | | D\|Strain | TEVHPTYPTQVTPQSQPATMAHQTATANQ | | |
| | | Name:Turkey/ | RSSTTEPVGSQGNTTSSNPEQQTEPPPSPQH | | |
| | | 1985/Fr85.1\| | PPTTTSQDQSTETADGQEHTPTRKTPTATS | | |
| | | Protein | NRRSPTPKRQETGRATPRNTATTQSGSSPP | | |
| | | Name: | HSSPPGVDANMEGQCKELQAPKPNSVCK | | |
| | | attachment | GLDIYREALPRGCDKVLPLCKTSTIMCVD | | |
| | | glycoprotein\| | AYYSKPPICFGYNQRCFCMETFGPIEFCCK | | |
| | | Gene Symbol:G | S | | |
| JN032116 | 4659-5252 | gb:JN032116: | MSKNKNQRTARTLEKTWDTLNHLIVISSC | 1 | 129 |
| | | 4659- | LYKLNLKSIAQIALSVLAMIISTSLIIAAIIFII | | |
| | | 5252\|Organism: | SANHKVTLTTVTVQTIKNHTEKNITTYLTQ | | |
| | | Respiratory | VSPERVSPSKQPTTTPPIHTNSATISPNTKSE | | |
| | | syncytial | IHHTTAQTKGRTSTPTQNNKPNTKPRPKNP | | |
| | | virus\|Strain | PKKDDYHFEVFNFVPCSICGNNQLCKSICK | | |
| | | Name:B/WI/629- | TIPSNKPRKNQP | | |
| | | 12/06- | | | |
| | | 07\|Protein | | | |
| | | Name: | | | |
| | | attachment | | | |
| | | glycoprotein\| | | | |
| | | Gene Symbol:G | | | |
| KX258200 | 6254-7996 | gb:KX258200: | MEGSRTVIYQGDPNEKNTWRLVFRTLTLI | 1 | 130 |
| | | 6254- | LNLAILSVTIASIIITSKITLSEVTTLKTEGVE | | |
| | | 7996\|Organism: | EVITPLMATLSDSVQQEKMIYKEVAISIPLV | | |
| | | Avian | LDKIQTDVGTSVAQITDALRQIQGVNGTQ | | |
| | | paramyxovirus | AFALSNAPEYSGGIEVPLFQIDSFVNKSMSI | | |
| | | 14\|Strain | SGLLEHASFIPSPTTLHGCTRIPSFHLGPRH | | |
| | | Name:APMV14/ | WCYTHNIIGSRCRDEGFSSMYISIGAITVNR | | |
| | | duck/Japan/ | DGNPLFITTASTILADDNNRKSCSIIASSYG | | |
| | | 11OG0352/2011 | CDLLCSIVTESENDDYANPNPTKMVHGRF | | |
| | | \|Protein | LYNGSYVEQALPNSLFQDKWVAQYPGVG | | |
| | | Name: | SGITTHGKVLFPIYGGIKKNTQLFYELSKY | | |
| | | hemagglutinin- | GFFAHNKELECKNMTEEQIRDIKAAYLPS | | |
| | | neuraminidase | KTSGNLFAQGIIYCNISKLGDCNVAVLNTS | | |
| | | protein\|Gene | TTMMGAEGRLQMMGEYVYYYQRSSSWW | | |
| | | Symbol:HN | PVGIVYKKSLAELMNGINMEVLSFEPIPLS | | |
| | | | KFPRPTWTAGLCQKPSICPDVCVTGVYTD | | |
| | | | LFSVTIGSTTDKDTYFGVYLDSATERKDP | | |
| | | | WVAAADQYEWRNRVRLFESTTEAAYTTS | | |
| | | | TCFKNTVNNRVFCVSIVELRENLLGDWKI | | |
| | | | VPLLFQIGVSQGPPPK | | |
| KX940961 | 7978-12504 | gb:KX940961: | MSQLAAHNLAMSNFYGTHQGDLSGSQKG | 1 | 131 |
| | | 7978- | EEQQVQGVIRYVSMIVGLLSLFTIIALNVT | | |
| | | 12504\|Organism: | NIIYMTESGGTMQSIKTAQGSIDGSMREIS | | |
| | | Beilong | GVIMEDVKPKTDLINSMVSYNIPAQLSMIH | | |
| | | virus\|Strain | QIIKNDVLKQCTPSFMFNNTICPLAENPTHS | | |
| | | Name:ERN081008_1S | RYFEEVNLDSISECSGPDMHLGLGVNPEFI | | |
| | | \|Protein | EFPSFAPGSTKPGSCVRLPSFSLSTTVFAYT | | |
| | | Name: | HTIMGHGCSELDVGDHYFSVGRIADAGHE | | |
| | | nattachmet | IPQFETISSWFINDKINRRSCTVAAGAMEA | | |
| | | glycoprotein\| | WMGCVIMTETFYDDLNSLDTGKLTISYLD | | |
| | | Gene Symbol:G | VFGRKKEWIYTRSEILYDYTYTSVYFSVGS | | |
| | | | GVVVGDTVYFLIWGSLSSPIEETAYCFAPD | | |
| | | | CSNYNQRMCNEAQRPSKFGHRQMVNGIL | | |
| | | | KFKTTSTGKPLLSVGTLSPSVVPFGSEGRL | | |
| | | | MYSEITKIIYLYLRSTSWHALPLTGLFVLGP | | |
| | | | PTSISWIVQRAVSRPGEFPCGASNRCPKDC | | |
| | | | VTGVYTDLFPLGSRYEYAATVYLNSETYR | | |
| | | | VNPTLALINQTNIIASKKVTTESQRAGYTT | | |
| | | | TTCFVFKLRVWCISVVELAPSTMTAYEPIP | | |
| | | | FLYQLDLTCKGKNGSLAMRFTGKEGTYKS | | |
| | | | GRYKSPRNECFFEKVSNKYYFIVSTPEGIQ | | |
| | | | PYEIRDLTPDRMPHIIMYISDVCAPALSAFK | | |
| | | | KLLPAMRPITTLTIGNWQFRPVEVSGGLRV | | |
| | | | SIGRNLTKEGDLTMSAPEDPGSNTFPGGHI | | |
| | | | PGNGLFDAGYYTVEYPKEWKQTTPKPSEG | | |
| | | | GNIIDKNKTPVIPSRDNPTSDSSIPHRESIEP | | |
| | | | VRPTREVLKSSDYVTIVSTDSGSGSGDFAT | | |
| | | | GVPWTGVSPKAPQNGINLPGTELPHPTVL | | |
| | | | DRINTPAPSDPKVSADSDHTRDTIDPTALS | | |
| | | | KPLNHDTTGDTDTRINTGTATYGFTPGRE | | |
| | | | ATSSGKLANDLTNSTSVPSEAHPSASTSEA | | |
| | | | SKPEKNTDNRVTQDPTSGTAERPTTNAPV | | |
| | | | DGKHSTQLTDARPNTADPERTSQHSSSTTR | | |
| | | | DEVKPSLPSTTEASTHQRTEAATPPELVNN | | |
| | | | TLNPPSTQVRSVRSLMQDAIAQAWNFVRG | | |
| | | | VTP | | |
| KY511044 | 6454-8310 | gb:KY511044: | MERGISEVALANDRTEEKNTWRLIFRITVL | 1 | 132 |
| | | 6454- | VVSVITLGLTAASLVYSMNAAQPADFDGII | | |
| | | 8310\|Organism: | PAVQQVGTSLTNSIGGMQDVLDRTYKQV | | |
| | | Avian | ALESPLTLLNMESTIMNAITSLSYKINNGG | | |
| | | paramyxovirus | NSSGCGAPIHDPEYIGGIGKELLIDDNVDV | | |
| | | UPO216\|Strain | TSFYPSAFKEHLNFIPAPTTGAGCTRIPSFD | | |
| | | Name:APMV- | LSATHYCYTHNVILSGCQDHSHSHQYIAL | | |
| | | 15/WB/Kr/ | GVLKLSDTGNVFFSTLRSINLDDTANRKSC | | |
| | | UPO216/2014\| | SISATPLGCDILCSKVTETELEDYKSEEPTP | | |
| | | Protein | MVHGRLSFDGTYSEKDLDVNNLFSDWTA | | |
| | | Name: | NYPSVGGGSYIGNRVWYAVYGGLKPGSN | | |
| | | hemagglutinin- | TDQSQRDKYVIYKRYNNTCPDPEDYQINK | | |
| | | neuraminidase | AKSSYTPSYFGSKRVQQAILSIAVSPTLGSD | | |
| | | protein\|Gene | PVLTPLSNDVVLMGAEGRVMHIGGYTYL | | |
| | | Symbol:HN | YQRGTSYYSPALLYPLNIQDKSATASSPYK | | |
| | | | FDAFTRPGSVPCQADARCPQSCVTGVYTD | | |
| | | | PYPLIFAKDHSIRGVYGMMLNDVTARLNPI | | |
| | | | AAVFSNISRSQITRVSSSSTKAAYTTSTCFK | | |
| | | | VIKTNRIYCMSIAEISNTLFGEFRIVPLLVEI | | |
| | | | LSNGGNTARSAGGTPVKESPKGWSDAIAE | | |
| | | | PLFCTPTNVTRYNADIRRYAYSWP | | |
| NC_025360 | 8127-10158 | gb:NC_025360: | MPPAPSPVHDPSSFYGSSLFNEDTASRKGT | 1 | 133 |
| | | 8127- | SEEIHLLGIRWNTVLIVLGLILAIIGIGIGASS | | |
| | | 10158\|Organism: | FSASGITGNTTKEIRLIVEEMSYGLVRISDS | | |
| | | Atlantic | VRQEISPKVTLLQNAVLSSIPALVTTETNTII | | |
| | | salmon | NAVKNHCNSPPTPPPPTEAPLKKHETGMA | | |
| | | paramyxovirus1 | PLDPTTYWTCTSGTPRFYSSPNATFIPGPSP | | |
| | | Strain | LPHTATPGGCVRIPSMHIGSEIYAYTSNLIA | | |
| | | Name:ASPV/ | SGCQDIGKSYQNVQIGVLDRTPEGNPEMS | | |
| | | Yrkje371/95\| | PMLSHTFPINDNRKSCSIVTLKRAAYIYCS | | |
| | | Protein | QPKVTEFVDYQTPGIEPMSLDHINANGTTK | | |
| | | Name: | TWIYSPTEVVTDVPYASMYPSVGSGVVID | | |
| | | hemagglutinin- | GKLVFLVYGGLLNGIQVPAMCLSPECPGID | | |
| | | neuraminidase | QAACNASQYNQYLSGRQVVNGIATVDLM | | |
| | | protein\|Gene | NGQKPHISVETISPSKNWFGAEGRLVYMG | | |
| | | Symbol:HN | GRLYIYIRSTGWHSPIQIGVIYTMNPLAITW | | |
| | | | VTNTVLSRPGSAGCDWNNRCPKACLSGV | | |
| | | | YTDAYPISPDYNHLATMILHSTSTRSNPVM | | |
| | | | VYSSPTNMVNYAQLTTTAQIAGYTTTSCF | | |
| | | | TDNEVGYCATALELTPGTLSSVQPILVMT | | |
| | | | KIPKECV | | |

[0514] ii) Lipid Fusogens

[0515] In some embodiments, the fusosome may be treated with fusogenic lipids, such as saturated fatty acids. In some embodiments, the saturated fatty acids have between 10-14 carbons. In some embodiments, the saturated fatty acids have longer-chain carboxylic acids. In some embodiments, the saturated fatty acids are mono-esters.

[0516] In some embodiments, the fusosome may be treated with unsaturated fatty acids. In some embodiments, the unsaturated fatty acids have between C16 and C18 unsaturated fatty acids. In some embodiments, the unsaturated fatty acids include oleic acid, glycerol mono-oleate, glycerides, diacylglycerol, modified unsaturated fatty acids, and any combination thereof.

[0517] Without wishing to be bound by theory, in some embodiments negative curvature lipids promote membrane fusion. In some embodiments, the fusosome comprises one or more negative curvature lipids, e.g., negative curvature lipids that are exogenous relative to the source cell, in the membrane. In embodiments, the negative curvature lipid or a precursor thereof is added to media comprising source cells or fusosomes. In embodiments, the source cell is engineered to express or overexpress one or more lipid synthesis genes. The negative curvature lipid can be, e.g., diacylglycerol (DAG), cholesterol, phosphatidic acid (PA), phosphatidylethanolamine (PE), or fatty acid (FA).

[0518] Without wishing to be bound by theory, in some embodiments positive curvature lipids inhibit membrane fusion. In some embodiments, the fusosome comprises reduced levels of one or more positive curvature lipids, e.g., exogenous positive curvature lipids, in the membrane. In embodiments, the levels are reduced by inhibiting synthesis of the lipid, e.g., by knockout or knockdown of a lipid synthesis gene, in the source cell. The positive curvature lipid can be, e.g., lysophosphatidylcholine (LPC), phosphatidylinositol (PtdIns), lysophosphatidic acid (LPA), lysophosphatidylethanolamine (LPE), or monoacylglycerol (MAG).

[0519] iii) Chemical Fusogens

[0520] In some embodiments, the fusosome may be treated with fusogenic chemicals. In some embodiments, the fusogenic chemical is polyethylene glycol (PEG) or derivatives thereof.

[0521] In some embodiments, the chemical fusogen induces a local dehydration between the two membranes that leads to unfavorable molecular packing of the bilayer. In some embodiments, the chemical fusogen induces dehydration of an area near the lipid bilayer, causing displacement of aqueous molecules between cells and allowing interaction between the two membranes together.

[0522] In some embodiments, the chemical fusogen is a positive cation. Some nonlimiting examples of positive cations include Ca2+, Mg2+, Mn2+, Zn2+, La3+, Sr3+, and H+.

[0523] In some embodiments, the chemical fusogen binds to the target membrane by modifying surface polarity, which alters the hydration-dependent intermembrane repulsion.

[0524] In some embodiments, the chemical fusogen is a soluble lipid soluble. Some nonlimiting examples include oleoylglycerol, dioleoylglycerol, trioleoylglycerol, and variants and derivatives thereof.

[0525] In some embodiments, the chemical fusogen is a water-soluble chemical. Some nonlimiting examples include polyethylene glycol, dimethyl sulphoxide, and variants and derivatives thereof.

[0526] In some embodiments, the chemical fusogen is a small organic molecule. A nonlimiting example includes n-hexyl bromide.

[0527] In some embodiments, the chemical fusogen does not alter the constitution, cell viability, or the ion transport properties of the fusogen or target membrane.

[0528] In some embodiments, the chemical fusogen is a hormone or a vitamin. Some nonlimiting examples include abscisic acid, retinol (vitamin A1), a tocopherol (vitamin E), and variants and derivatives thereof.

[0529] In some embodiments, the fusosome comprises actin and an agent that stabilizes polymerized actin. Without wishing to be bound by theory, stabilized actin in a fusosome can promote fusion with a target cell. In embodiments, the agent that stabilizes polymerized actin is chosen from actin, myosin, biotin-streptavidin, ATP, neuronal Wiskott-Aldrich syndrome protein (N-WASP), or formin. See, e.g., Langmuir. 2011 Aug. 16; 27(16):10061-71 and Wen et al., Nat Commun. 2016 Aug. 31; 7. In embodiments, the fusosome comprises actin that is exogenous or overexpressed relative to the source cell, e.g., wild-type actin or actin comprising a mutation that promotes polymerization. In embodiments, the fusosome comprises ATP or phosphocreatine, e.g., exogenous ATP or phosphocreatine.

[0530] iv) Small Molecule Fusogens

[0531] In some embodiments, the fusosome may be treated with fusogenic small molecules. Some nonlimiting examples include halothane, nonsteroidal anti-inflammatory drugs (NSAIDs) such as meloxicam, piroxicam, tenoxicam, and chlorpromazine.

[0532] In some embodiments, the small molecule fusogen may be present in micelle-like aggregates or free of aggregates.

[0533] v) Fusogen Modifications

[0534] In some embodiments, the fusogen is linked to a cleavable protein. In some cases, a cleavable protein may be cleaved by exposure to a protease. An engineered fusion protein may bind any domain of a transmembrane protein. The engineered fusion protein may be linked by a cleavage peptide to a protein domain located within the intermembrane space. The cleavage peptide may be cleaved by one or a combination of intermembrane proteases (e.g. HTRA2/OMI which requires a non-polar aliphatic amino acid—valine, isoleucine or methionine are preferred—at position P1, and hydrophilic residues—arginine is preferred—at the P2 and P3 positions).

[0535] In some embodiments the fusogen is linked to an affinity tag. In some embodiments the affinity tag aids in fusosome separation and isolation. In some embodiments the affinity tag is cleavable. In some embodiments the affinity tag is non-covalently linked to the fusogen. In some embodiments the affinity tag is present on the fusosome and separate from the fusogen.

[0536] In some embodiments, fusogen proteins are engineered by any methods known in the art or any method described herein to comprise a proteolytic degradation sequence, e.g., a mitochondrial or cytosolic degradation sequence. Fusogen proteins may be engineered to include, but is not limited to a proteolytic degradation sequence, e.g., a Caspase 2 protein sequence (e.g., Val-Asp-Val-Ala-Asp-I- (SEQ ID NO: 155)) or other proteolytic sequences (see, for example, Gasteiger et al., The Proteomics Protocols Handbook; 2005: 571-607), a modified proteolytic degradation sequence that has at least 75%, 80%, 85%, 90%, 95% or greater identity to the wildtype proteolytic degradation sequence, a cytosolic proteolytic degradation sequence, e.g., ubiquitin, or a modified cytosolic proteolytic degradation sequence that has at least 75%, 80%, 85%, 90%, 95% or greater identity to the wildtype proteolytic degradation sequence. In some embodiments, a composition comprises mitochondria in a source cell or chondrisome comprising a protein modified with a proteolytic degradation sequence, e.g., at least 75%, 80%, 85%, 90%, 95% or greater identity to the wildtype proteolytic degradation sequence, a cytosolic proteolytic degradation sequence, e.g., ubiquitin, or a modified cytosolic proteolytic degradation sequence that has at least 75%, 80%, 85%, 90%, 95% or greater identity to the wildtype proteolytic degradation sequence.

[0537] In some embodiments, the fusogen may be modified with a protease domain that recognizes specific proteins, e.g., over-expression of a protease, e.g., an engineered fusion protein with protease activity. For example, a protease or protease domain from a protease, such as MMP, mitochondrial processing peptidase, mitochondrial intermediate peptidase, inner membrane peptidase.

[0538] See, Alfonzo, J. D. & Soll, D. Mitochondrial tRNA import—the challenge to understand has just begun. Biological Chemistry 390: 717-722. 2009; Langer, T. et al. Characterization of Peptides Released from Mitochondria. THE JOURNAL OF BIOLOGICAL CHEMISTRY. Vol. 280, No. 4. 2691-2699, 2005; Vliegh, P. et al. Synthetic therapeutic peptides: science and market. Drug Discovery Today. 15(1/2). 2010; Quiros P.M.m et al., New roles for mitochondrial proteases in health, ageing and disease. Nature Reviews Molecular Cell Biology. V16, 2015; Weber-Lotfi, F. et al. DNA import competence and mitochondrial genetics. Biopolymers and Cell. Vol. 30. N 1. 71-73, 2014.

### III. Positive Target Cell-Specific Regulatory Element

[0539] In some embodiments, a fusosome described herein, e.g. a virus, e.g., a retrovirus, contains a nucleic acid (e.g., the gene encoding the exogenous agent), e.g. a retroviral nucleic acid, that comprises a positive target cell-specific regulatory element such as a tissue-specific promoter, a tissue-specific enhancer, a tissue-specific splice site, a tissue-specific site extending half-life of an RNA or protein, a tissue-specific mRNA nuclear export promoting site, a tissue-specific translational enhancing site, or a tissue-specific post-translational modification site.

[0540] In some embodiments, a fusosome, e.g. virus, e.g. retrovirus, described herein contains a nucleic acid, e.g. a retroviral nucleic acid, that can comprise regions, e.g., non-translated regions such as origins of replication, selection cassettes, promoters, enhancers, translation initiation signals (Shine Dalgarno sequence or Kozak sequence), introns, a polyadenylation sequence, 5′ and 3′ untranslated regions—which interact with host cellular proteins to carry out transcription and translation, and which are capable of directing, increasing, regulating, or controlling the transcription or expression of an operatively linked polynucleotide. Such elements may vary in their strength and specificity. Depending on the vector system and host utilized, any number of suitable transcription and translation elements, including ubiquitous promoters and inducible promoters may be used.

[0541] In particular embodiments, control elements are capable of directing, increasing, regulating, or controlling the transcription or expression of an operatively linked polynucleotide in a cell-specific manner. In particular embodiments, a nucleic acid, e.g. retroviral nucleic acids, comprise one or more expression control sequences that are specific to particular cells, cell types, or cell lineages e.g., target cells; that is, expression of polynucleotides operatively linked to an expression control sequence specific to particular cells, cell types, or cell lineages is expressed in target cells and not (or at a lower level) in non-target cells.

[0542] In particular embodiments, a nucleic acid, e.g. a retroviral nucleic acid, can include exogenous, endogenous, or heterologous control sequences such as promoters and/or enhancers.

[0543] In embodiments, the promoter comprises a recognition site to which an RNA polymerase binds. An RNA polymerase initiates and transcribes polynucleotides operably linked to the promoter. In particular embodiments, promoters operative in mammalian cells comprise an AT-rich region located approximately 25 to 30 bases upstream from the site where transcription is initiated and/or another sequence found 70 to 80 bases upstream from the start of transcription, a CNCAAT region where N may be any nucleotide.

[0544] In embodiments, an enhancer comprises a segment of DNA which contains sequences capable of providing enhanced transcription and in some instances can function independent of orientation relative to another control sequence. An enhancer can function cooperatively or additively with promoters and/or other enhancer elements. In some embodiments, a promoter/enhancer segment of DNA contains sequences capable of providing both promoter and enhancer functions.

[0545] Illustrative ubiquitous expression control sequences include, but are not limited to, a cytomegalovirus (CMV) immediate early promoter, a viral simian virus 40 (SV40) (e.g., early or late), a Moloney murine leukemia virus (MoMLV) LTR promoter, a Rous sarcoma virus (RSV) LTR, a herpes simplex virus (HSV) (thymidine kinase) promoter, H5, P7.5, and P11 promoters from vaccinia virus, an elongation factor 1-alpha (EF1a) promoter, early growth response 1 (EGR1), ferritin H (FerH), ferritin L (FerL), Glyceraldehyde 3-phosphate dehydrogenase (GAPDH), eukaryotic translation initiation factor 4A1 (EIF4A1), heat shock 70 kDa protein 5 (HSPA5), heat shock protein 90 kDa beta, member 1 (HSP90B1), heat shock protein 70 kDa (HSP70), β-kinesin (β-KIN), the human ROSA 26 locus Orions et al., Nature Biotechnology 25, 1477-1482 (2007)), a Ubiquitin C promoter (UBC), a phosphoglycerate kinase-1 (PGK) promoter, a cytomegalovirus enhancer/chicken β-actin (CAG) promoter, a β-actin promoter and a myeloproliferative sarcoma virus enhancer, negative control region deleted, d1587rev primer-binding site substituted (MND) promoter (Challita et al., J Virol. 69(2):748-55 (1995)).

[0546] In some embodiments, a promoter may be paired with a heterologous gene to impart the regulatory functions of that promoter on the heterologous gene. In some embodiments, the cis-regulatory elements from a first gene's promoter may be linked to segments of a different gene's promoter to create chimeric promoters that have properties of both promoters.

[0547] In some embodiments, the promoter is a tissue-specific promoter, e.g., a promoter that drives expression in CNS cells, e.g., pan-neuronal cells, GABAergic neurons, Glutamatergic neurons, Cholinergic neurons, Dopaminergic neurons, Serotonergic neurons, astrocytes, microglia, oligodendrocytes, or choroid plexus cells. Various suitable CNS cell-specific promoters are described in Table 3 below. In some embodiments, a fusosome (e.g., viral vector) described herein comprises, in its nucleic acid, a promoter having a sequence of a promoter in Table 3, or transcriptionally active fragment thereof, or a variant having at least 70%, 75%, 80%, 85%, 90%, 95%, 96%, 97%, 98%, or 99% identity thereto. In some embodiments, a fusosome (e.g., viral vector) described herein comprises, in its nucleic acid, a promoter having transcription factor binding sites from the region within 3 kb of the transcriptional start site for the genes listed in Table 3. In some embodiments, a fusosome (e.g., viral vector) described herein comprises, in its nucleic acid, a region within 2.5 kb, 2 kb, 1.5 kb, 1 kb, or 0.5 kb immediately upstream of the transcriptional start site of a gene listed in Table 3, or a transcriptionally active fragment thereof, or a variant having at least 70%, 75%, 80%, 85%, 90%, 95%, 96%, 97%, 98%, or 99% identity thereto.

TABLE 3
Exemplary promoters, e.g., CNS cell-specific promoters

| Target cell type | Exemplary promoters |
|---|---|
| Pan-neuronal | SYN, NSE, CaMKII, aTubulin, PDGF |
| GABAergic neurons | fSST, fNPY, GAD67, DLX5/6 |
| Glutamatergic neurons | VGLUT1, Dock10 |
| Cholinergic neurons | ChAT, VAChT |
| Dopaminergic neurons | Drd1a |
| Serotonergic neurons | TPH-2 |
| Astrocytes | GFAP, EAAT1, GS |
| Microglia | CX3CR1, TMEM119 |
| Oligodendrocytes | MBP, CNP |
| Choroid plexus | CRFR2β |

[0548] In some embodiments, the CNS cell-specific promoter is a promoter described in Hioki et al., Ther. 2007 June; 14(11):872-82, herein incorporated by reference in its entirety, e.g., the CNS cell-specific promoter is a SYN, NSE, CaMKII, aTubulin, or PDGF promoter. In some embodiments, the CNS cell-specific promoter is a promoter described in Nathanson et al., Front. Neural Circuits, 2009, 3:19. doi: 10.3389/neuro.04.019.2009, herein incorporated by reference in its entirety, e.g., the CNS cell-specific promoter is a fSST or fNPY promoter. In some embodiments, the CNS cell-specific promoter is a promoter described in Delzor et al., Hum Gene Ther Methods. 2012 August; 23(4):242-54, herein incorporated by reference in its entirety, e.g., the CNS cell-specific promoter is a GAD67 or DLXS/6 promoter. In some embodiments, the CNS cell-specific promoter is a promoter described in Egashira et al., Sci Rep. 2018 Oct. 11; 8(1):15156, herein incorporated by reference in its entirety, e.g., the CNS cell-specific promoter is a VGLUT1 or Dock10 promoter. In some embodiments, the CNS cell-specific promoter is a promoter described in Naciff et al., J. Neurochem., 1999 January; 72(1):17-28, herein incorporated by reference in its entirety, e.g., the CNS cell-specific promoter is a ChAT promoter. In some embodiments, the CNS cell-specific promoter is a VAChT promoter. In some embodiments, the CNS cell-specific promoter is a promoter described in Delzor et al., Hum Gene Ther Methods. 2012 August; 23(4): 242-254, herein incorporated by reference in its entirety, e.g., the CNS cell-specific promoter is a Drd1a promoter. In some embodiments, the CNS cell-specific promoter is a promoter described in Benzekhroufa et al., Gene Ther. 2009 May; 16(5):681-8, herein incorporated by reference in its entirety, e.g., the CNS cell-specific promoter is a TPH-2 promoter. In some embodiments, the CNS cell-specific promoter is a promoter described in Merienne et al., Gene Ther. 2015 October; 22(10):830-9, herein incorporated by reference in its entirety, e.g., the CNS cell-specific promoter is a GFAP, EAAT1, or GS promoter. In some embodiments, the CNS cell-specific promoter is a promoter described in Immgen consortium, herein incorporated by reference in its entirety, e.g., the CNS cell-specific promoter is a CX3CR1 promoter. In some embodiments, the CNS cell-specific promoter is a TMEM119 promoter. In some embodiments, the CNS cell-specific promoter is a promoter described in McIver et al., J Neurosci Res. 2005 Nov. 1; 82(3):397-403, herein incorporated by reference in its entirety, e.g., the CNS cell-specific promoter is a MBP promoter. In some embodiments, the CNS cell-specific promoter is a promoter described in Kagiava et al., J Gene Med. 2014 November-December; 16(11-12):364-73, herein incorporated by reference in its entirety, e.g., the CNS cell-specific promoter is a MBP or CNP promoter. In some embodiments, the CNS cell-specific promoter is a promoter described in Regev et al., Proc Natl Acad Sci U S A. 2010 Mar. 2; 107(9):4424-9, herein incorporated by reference in its entirety, e.g., the CNS cell-specific promoter is a CRFR2β promoter. In some embodiments, the CNS cell-specific promoter is a transcriptionally active fragment of any of the foregoing. In some embodiments, the CNS-cell specific promoter is a variant having at least 70%, 75%, 80%, 85%, 90%, 95%, 96%, 97%, 98%, or 99% identity to any of the foregoing.

[0549] An internal ribosome entry site (IRES) typically promotes direct internal ribosome entry to the initiation codon, such as ATG, of a cistron (a protein encoding region), thereby leading to the cap-independent translation of the gene. See, e.g., Jackson et al, (1990) Trends Biochem Sci 15(12):477-83) and Jackson and Kaminski. (1995) RNA 1 (10):985-1000. In particular embodiments, a vector includes one or more exogenous genes encoding one or more exogenous agents. In particular embodiments, to achieve efficient translation of each of the plurality of exogenous protein agents, the polynucleotide sequences can be separated by one or more IRES sequences or polynucleotide sequences encoding self-cleaving polypeptides.

[0550] The nucleic acid, e.g. retroviral nucleic acids herein, can also comprise one or more Kozak sequences, e.g., a short nucleotide sequence that facilitates the initial binding of mRNA to the small subunit of the ribosome and increases translation. The consensus Kozak sequence is (GCC)RCCATGG, where R is a purine (A or G) (Kozak, (1986) Cell. 44(2):283-92, and Kozak, (1987) Nucleic Acids Res. 15(20): 8125-48).

[0551] Promoters Responsive to a Heterologous Transcription Factor and Inducer

[0552] In some embodiments, a nucleic acid, retroviral nucleic acid, comprises an element allowing for conditional expression of the exogenous agent, e.g., any type of conditional expression including, but not limited to, inducible expression; repressible expression; cell type-specific expression, or tissue-specific expression. In some embodiments, to achieve conditional expression of the exogenous agent, expression is controlled by subjecting a cell, tissue, or organism to a treatment or condition that causes the exogenous agent to be expressed or that causes an increase or decrease in expression of the exogenous agent.

[0553] Illustrative examples of inducible promoters/systems include, but are not limited to, steroid-inducible promoters such as promoters for genes encoding glucocorticoid or estrogen receptors (inducible by treatment with the corresponding hormone), metallothionine promoter (inducible by treatment with various heavy metals), MX-1 promoter (inducible by interferon), the “GeneSwitch” mifepristone-regulatable system (Sirin et al., 2003, Gene, 323:67), the cumate inducible gene switch (WO 2002/088346), tetracycline-dependent regulatory systems, etc.

[0554] Transgene expression may be activated or repressed by the presence or absence of an inducer molecule. In some cases the inducer molecule activates or represses gene expression in a graded manner, and in some cases the inducer molecules activates or represses gene expression in an all-or-nothing manner.

[0555] A commonly used inducible promoter/system is tetracycline (Tet)-regulated system. The Tet system is based on the coexpression of two elements in the respective target cell: (i) the tetracycline response element containing repeats of the Tet-operator sequences (TetO) fused to a minimal promoter and connected to a gene of interest (e.g., a gene encoding the exogenous agent) and (ii) the transcriptional transactivator (tTA), a fusion protein of the Tet-repressor (TetR) and the transactivation domain of the herpes simplex virus derived VP16 protein. Whereas in the originally described version, transgene expression was active in the absence of tetracycline or its potent analogue doxycycline (Do), referred to as Tet-OFF system, modification of four amino acids within the transactivator protein resulted in a reverse tTA (rtTA), which only binds to TetO in the presence of Dox (Tet-ON system). In some embodiments, in the transactivator, the VP16 domain has been replaced by minimal activation domains, potential splice-donor and splice acceptor sites have been removed, and the protein has been codon optimization, resulting in the improved Transactivator variant rtTA2S-M2 with higher sensitivity to Dox and lower baseline activity. Furthermore, different Tet-responsive promoter elements have been generated, including modification in the TetO with 36-nucleotide spacing from neighboring operators to enhance regulation. Additional modifications may be useful to further reduce basal activity and increase the expression dynamic range. As an example, the pTet-T11 (short: TII) variant displays a high dynamic range and low background activity.

[0556] Conditional expression can also be achieved by using a site specific DNA recombinase. According to certain embodiments, the nucleic acid, e.g. retroviral nucleic acid, comprises at least one (typically two) site(s) for recombination mediated by a site specific recombinase, e.g., an excisive or integrative protein, enzyme, cofactor or associated protein that is involved in recombination reactions involving one or more recombination sites (e.g., two, three, four, five, seven, ten, twelve, fifteen, twenty, thirty, fifty, etc.), which may be wild-type proteins (see Landy, Current Opinion in Biotechnology 3:699-707 (1993)), or mutants, derivatives (e.g., fusion proteins containing the recombination protein sequences or fragments thereof), fragments, and variants thereof. Illustrative examples of recombinases include, but are not limited to: Cre, Int, IHF, Xis, Flp, Fis, Hin, Gin, ΦC31, Cin, Tn3 resolvase, TndX, XerC, XerD, TnpX, Hjc, Gin, SpCCE1, and ParA.

[0557] Riboswitches to Regulate Exogenous Agent Expression

[0558] Some of the compositions and methods provided herein include one or more riboswitches or polynucleotides that include one or more riboswitch. Riboswitches are a common feature in bacteria to regulate gene expression and are a means to achieve RNA control of biological functions. Riboswitches can be present in the 5′-untranslated region of mRNAs and can allow for regulatory control over gene expression through binding of a small molecule ligand that induces or suppresses a riboswitch activity. In some embodiments, the riboswitch controls a gene product involved in the generation of the small molecule ligand. Riboswitches typically act in a cis-fashion, although riboswitches have been identified that act in a trans-fashion. Natural riboswitches consist of two domains: an aptamer domain that binds the ligand through a three-dimensional folded RNA structure and a function switching domain that induces or suppresses an activity in the riboswitch based on the absence or presence of the ligand. Thus, there are two ligand sensitive conformations achieved by the riboswitch, representing on and off states (Garst et al., 2011). The function switching domain can affect the expression of a polynucleotide by regulating: an internal ribosome entry site, pre-mRNA splice donor accessibility in the retroviral gene construct, translation, termination of transcription, transcript degradation, miRNA expression, or shRNA expression (Dambach and Winkler 2009). The aptamer and function switching domains can be used as modular components allowing for synthetic RNA devices to control gene expression either as native aptamers, mutated/evolved native aptamers, or totally synthetic aptamers that are identified from screening random RNA libraries (McKeague et al 2016).

[0559] The purine riboswitch family represents one of the largest families with over 500 sequences found (Mandal et al 2003; US20080269258; and WO2006055351). The purine riboswitches share a similar structure consisting of three conserved helical elements/stem structures (PI, P2, P3) with intervening loop/junction elements (J1-2, L2, J2-3, L3, J3-1). The aptamer domains of the purine family of riboswitches naturally vary in their affinity/regulation by various purine compounds such as adenine, guanine, adenosine, guanosine, deoxyadenosine, deoxyguanosine, etc. due to sequence variation (Kim et al. 2007)

[0560] In some embodiments, a nucleic acid, e.g. retroviral nucleic acid, described herein comprises a polynucleotide encoding the exogenous agent operably linked to a promoter and a riboswitch. The riboswitch include one or more of, e.g., all of: a.) an aptamer domain, e.g., an aptamer domain capable of binding a nucleoside analogue antiviral drug and having reduced binding to guanine or 2′-deoxyguanosine relative to the nucleoside analogue antiviral drug; and b.) a function switching domain, e.g., a function switching domain capable of regulating expression of the exogenous agent, wherein binding of the nucleoside analogue by the aptamer domain induces or suppresses the expression regulating activity of the function switching domain, thereby regulating expression of the exogenous agent. In some embodiments, the exogenous agent can be a polypeptide, an miRNA, or an shRNA. For example, in an embodiment, the riboswitch is operably linked to a nucleic acid encoding a chimeric antigen receptor (CAR). In non-limiting illustrative examples provided herein, the exogenous gene encodes one or more engineered signaling polypeptides. For instance, the riboswitch and the target polynucleotide encoding one or more engineered signaling polypeptides can be found in the genome of a source cell, in a replication incompetent recombinant retroviral particle, in a T cell and/or in an NK cell.

[0561] The aptamer domains can be used, e.g., as modular components and combined with any of the function switching domains to affect the RNA transcript. In any of the embodiments disclosed herein, the riboswitch can affect the RNA transcript by regulating any of the following activities: internal ribosomal entry site (IRES), pre-mRNA splice donor accessibility, translation, termination of transcription, transcript degradation, miRNA expression, or shRNA expression. In some embodiments, the function switching domain can control binding of an anti-IRES to an IRES (see, e.g. Ogawa, RNA (2011), 17:478-488, the disclosure of which is incorporated by reference herein in its entirety). In any of the embodiments disclosed herein, the presence or absence of the small molecule ligand can cause the riboswitch to affect the RNA transcript. In some embodiments, the riboswitch can include a ribozyme. Riboswitches with ribozymes can inhibit or enhance transcript degradation of target polynucleotides in the presence of the small molecule ligand. In some embodiments, the ribozyme can be a pistol class of ribozyme, a hammerhead class of ribozyme, a twisted class of ribozyme, a hatchet class of ribozyme, or the HDV (hepatitis delta virus).

### IV. Non-Target Cell-Specific Regulatory Element

[0562] In some embodiments, the non-target cell specific regulatory element or negative TCSRE comprises a tissue-specific miRNA recognition sequence, tissue-specific protease recognition site, tissue-specific ubiquitin ligase site, tissue-specific transcriptional repression site, or tissue-specific epigenetic repression site.

[0563] In some embodiments, a non-target cell comprises an endogenous miRNA. In some embodiments, a fusosome described herein, e.g. a virus, e.g., a retrovirus, contains a nucleic acid, e.g. retroviral nucleic acid (e.g., the gene encoding the exogenous agent) that may comprise a recognition sequence for that miRNA. Thus, if the nucleic acid, retroviral nucleic acid, enters the non-target cell, the miRNA can downregulate expression of the exogenous agent. This helps achieve additional specificity for the target cell versus non-target cells.

[0564] In some embodiments, the miRNA is a small non-coding RNAs of 20-22 nucleotides, typically excised from ˜70 nucleotide foldback RNA precursor structures known as pre-miRNAs. In general, miRNAs negatively regulate their targets in one of two ways depending on the degree of complementarity between the miRNA and the target. First, miRNAs that bind with perfect or nearly perfect complementarity to protein-coding mRNA sequences typically induce the RNA-mediated interference (RNAi) pathway. miRNAs that exert their regulatory effects by binding to imperfect complementary sites within the 3′ untranslated regions (UTRs) of their mRNA targets, typically repress target-gene expression post-transcriptionally, apparently at the level of translation, through a RISC complex that is similar to, or possibly identical with, the one that is used for the RNAi pathway. Consistent with translational control, miRNAs that use this mechanism reduce the protein levels of their target genes, but the mRNA levels of these genes are only minimally affected. miRNAs (e.g., naturally occurring miRNAs or artificially designed miRNAs) can specifically target any mRNA sequence. For example, in one embodiment, the skilled artisan can design short hairpin RNA constructs expressed as human miRNA (e.g., miR-30 or miR-21) primary transcripts. This design adds a Drosha processing site to the hairpin construct and has been shown to greatly increase knockdown efficiency (Pusch et al., 2004). The hairpin stem consists of 22-nt of dsRNA (e.g., antisense has perfect complementarity to desired target) and a 15-19-nt loop from a human miR. Adding the miR loop and miR30 flanking sequences on either or both sides of the hairpin results in greater than 10-fold increase in Drosha and Dicer processing of the expressed hairpins when compared with conventional shRNA designs without microRNA. Increased Drosha and Dicer processing translates into greater siRNA/miRNA production and greater potency for expressed hairpins.

[0565] Hundreds of distinct miRNA genes are differentially expressed during development and across tissue types. Several studies have suggested important regulatory roles for miRNAs in a broad range of biological processes including developmental timing, cellular differentiation, proliferation, apoptosis, oncogenesis, insulin secretion, and cholesterol biosynthesis. (See Bartel 2004 Cell 116:281-97; Ambros 2004 Nature 431:350-55; Du et al. 2005 Development 132:4645-52; Chen 2005 N. Engl. J. Med. 353:1768-71; Krutzfeldt et al. 2005 Nature 438:685-89.) Molecular analysis has shown that miRNAs have distinct expression profiles in different tissues. Computational methods have been used to analyze the expression of approximately 7,000 predicted human miRNA targets. The data suggest that miRNA expression broadly contributes to tissue specificity of mRNA expression in many human tissues. (See Sood et al. 2006 PNAS USA 103(8):2746-51.)

[0566] Thus, an miRNA-based approach may be used for restricting expression of the exogenous agent to a target cell population by silencing exogenous agent expression in non-target cell types by using endogenous microRNA species. MicroRNA induces sequence-specific post-transcriptional gene silencing in many organisms, either by inhibiting translation of messenger RNA (mRNA) or by causing degradation of the mRNA. See, e.g., Brown et al. 2006 Nature Med. 12(5):585-91, and WO2007/000668, each of which is herein incorporated by reference in its entirety. In some embodiments, the nucleic acid, e.g. retroviral nucleic acid, comprises one or more of (e.g., a plurality of) tissue-specific miRNA recognition sequences. In some embodiments, the tissue-specific miRNA recognition sequence is about 20-25, 21-24, or 23 nucleotides in length. In embodiments, the tissue-specific miRNA recognition sequence has perfect complementarity to an miRNA present in a non-target cell. In some embodiments, the exogenous agent does not comprise GFP, e.g., does not comprise a fluorescent protein, e.g., does not comprise a reporter protein. In some embodiments, the off-target cells are not hematopoietic cell and/or the miRNA is not present in hematopoietic cells.

[0567] In some embodiments, a method herein comprises tissue-specific expression of an exogenous agent in a target cell comprising contacting a plurality of fusosomes, e.g. a virus, e.g. retroviral vectors, comprising a nucleotide encoding the exogenous agent and at least one tissue-specific microRNA (miRNA) target sequence with a plurality of cells comprising target cells and non-target cells, wherein the exogenous agent is preferentially expressed in, e.g., restricted, to the target cell.

[0568] For example, the nucleic acid, e.g. retroviral nucleic acid, can comprise at least one miRNA recognition sequence operably linked to a nucleotide sequence having a corresponding miRNA in a non-target cell, e.g., a hematopoietic progenitor cell (HSPC), hematopoietic stem cell (HSC), which prevents or reduces expression of the nucleotide sequence in the non-target cell but not in a target cell, e.g., differentiated cell. In some embodiments, the nucleic acid, e.g. retroviral nucleic acid, comprises at least one miRNA sequence target for a miRNA which is present in an effective amount (e.g., concentration of the endogenous miRNA is sufficient to reduce or prevent expression of a transgene) in the non-target cell, and comprises a transgene. In embodiments, the miRNA used in this system is strongly expressed in non-target cells, such as HSPC and HSC, but not in differentiated progeny of e.g. the myeloid and lymphoid lineage, preventing or reducing expression of a transgene in sensitive stem cell populations, while maintaining expression and therapeutic efficacy in the target cells.

[0569] In some embodiments, the negative TSCRE or NTSCRE comprises an miRNA recognition site. Exemplary miRNAs are provided in Table 4 below. In some embodiments, the nucleic acid (e.g., fusosome nucleic acid or retroviral nucleic acid) comprises a sequence that is complementary to a miRNA of Table 4, or has at least 50%, 60%, 70%, 75%, 80%, 85%, 90%, 95%, 96%, 97%, 98%, or 99% complementarity thereto. In some embodiments, the nucleic acid (e.g., fusosome nucleic acid or retroviral nucleic acid) comprises a sequence that is perfectly complementary to a seed sequence within an endogenous miRNA, e.g., miRNA of Table 4. In some embodiments, the miRNA comprises the sequence set forth in any one of SEQ ID NOS: 156-162. In embodiments, the seed sequence is at least 6, 7, 8, 9, or 10 nucleotides in length.

TABLE 4
Exemplary miRNAs.

| | miRNA name and silenced cell | | |
|---|---|---|---|
| Target cell type | type (non-target cell type) | SEQUENCE | SEQ ID NO |
| Pan-neuronal | miR-338-3p (for de-targeting from | miR-338-3p: | 156 |
| | oligodendrocytes); miR-9 and | uccagcaucagugauuuuguug | |
| GABAergic neurons | miR-125b-5p (for de-targeting from | miR-9-5p: | 157 |
| | astrocytes); miR-342-3p (for de- | ucuuugguuaucuagcuguauga | |
| Glutamatergic neurons | targeting from microglia) | miR-9-3p: | 158 |
| | | auaaagcuagauaaccgaaagu | |
| Cholinergic neurons | | miR-125b-5p: | 159 |
| | | ucccugagacccuaacuuguga | |
| Dopaminergic neurons | | miR-342-3p: | 160 |
| Serotonergic neurons | | ucucacacagaaaucgcacccgu | |
| Astrocytes | miR-124 (for de-targeting from | miR-124-3p: | 161 |
| Microglia | neuronal lineage) | uaaggcacgcggugaaugccaa | |
| Oligodendrocytes | | miR-124-5p: | 162 |
| Choroid plexus | | cguguucacagcggaccuugau | |

[0570] In some embodiments, the negative TSCRE or NTSCRE comprises an miRNA recognition site for an miRNA described herein. Exemplary miRNAs include those found in Butovsky et al., Nat Neurosci. 2014 January; 17(1):131-43, herein incorporated by reference in its entirety, e.g., miR-338-3p, miR-9, miR-125b-5p, or miR-342-3p. Additional exemplary miRNAs can be found in Delzor et al., Curr. Drug Targets, 2013 October; 14(11):1336-46, herein incorporated by reference in its entirety, e.g., miR-124.

[0571] In some embodiments, a fusosome described herein comprises a nucleic acid comprising a payload gene and a positive target cell-specific regulatory element, e.g., wherein the target cell is a neuron, e.g., a pan-neuronal cell, a GABAergic neuron, a Glutamatergic neuron, a Cholinergic neuron, a Dopaminergic neuron, or a Serotonergic neuron. In some embodiments, the nucleic acid further comprises a non-target cell-specific regulatory element (NTCSRE), e.g., wherein the NTSCRE comprises an miRNA recognition site for an miRNA expressed in a glial cell, e.g., an astrocyte, a microglial cell, or an oligodendrocyte.

[0572] In some embodiments, a fusosome described herein comprises a nucleic acid comprising a payload gene and a positive target cell-specific regulatory element, e.g., wherein the target cell is a glial cell, e.g., an astrocyte, a microglial cell, or an oligodendrocyte. In some embodiments, the nucleic acid further comprises a non-target cell-specific regulatory element (NTCSRE), e.g., wherein the NTSCRE comprises an miRNA recognition site for an miRNA expressed in a neuron, e.g., a pan-neuronal cell, a GABAergic neuron, a Glutamatergic neuron, a Cholinergic neuron, a Dopaminergic neuron, or a Serotonergic neuron.

[0573] In some embodiments, the negative TSCRE or NTSCRE comprises an miRNA recognition site for an miRNA described herein. Exemplary miRNAs include those found in Griffiths-Jones et al. Nucleic Acids Res. 2006 Jan. 1, 34; Chen and Lodish, Semin Immunol. 2005 April; 17(2):155-65; Chen et al. Science. 2004 Jan. 2; 303(5654):83-6; Barad et al. Genome Res. 2004 December; 14(12): 2486-2494; Krichevsky et al., RNA. 2003 October; 9(10):1274-81; Kasashima et al. Biochem Biophys Res Commun. 2004 Sep. 17; 322(2):403-10; Houbaviy et al., Dev Cell. 2003 August; 5(2):351-8; Lagos-Quintana et al., Curr Biol. 2002 Apr. 30; 12(9):735-9; Calin et al., Proc Natl Acad Sci U S A. 2004 Mar. 2; 101(9):2999-3004; Sempere et al. Genome Biol. 2004; 5(3): R13; Metzler et al., Genes Chromosomes Cancer. 2004 February; 39(2):167-9; Calin et al., Proc Natl Acad Sci U S A. 2002 Nov. 26; 99(24):15524-9; Mansfield et al. Nat Genet. 2004 October; 36(10):1079-83; Michael et al. Mol Cancer Res. 2003 October; 1(12):882-91; and at www.miRNA.org.

[0574] In some embodiments, the negative TSCRE or NTSCRE comprises an miRNA recognition site for an miRNA selected from miR-1b, miR-189b, miR-93, miR-125b, miR-130, miR-32, miR-128, miR-22, miR124a, miR-296, miR-143, miR-15, miR-141, miR-143, miR-16, miR-127, miR99a, miR-183, miR-19b, miR-92, miR-9, miR-130b, miR-21, miR-30b, miR-16, miR-99a, miR-212, miR-30c, miR-213, miR-20, miR-155, miR-152, miR-139, miR-30b, miR-7, miR-30c, miR-18, miR-137, miR-219, miR-1d, miR-178, miR-24, miR-122a, miR-215, miR-124a, miR-190, miR-149, miR-193, let-7a, miR-132, miR-27a, miR-9*, miR-200b, miR-266, miR-153, miR-135, miR-206, miR-24, miR-19a, miR-199, miR-26a, miR-194, miR-125a, miR-15a, miR-145, miR-133, miR-96, miR-131, miR-124b, miR-151, miR-7b, miR-103, and miR-208.

[0575] In some embodiments, the nucleic acid (e.g., retroviral nucleic acid) comprises two or more miRNA recognition sites. In some embodiments, the first miRNA recognition site and second miRNA recognition site are recognized by the same miRNA, and in some embodiments, the first miRNA recognition site and second miRNA recognition site are recognized by different miRNAs. In some embodiments, the first miRNA recognition site and second miRNA recognition site are recognized by miRNAs present in the same non-target cell, and in some embodiments, the first miRNA recognition site and second miRNA recognition site are recognized by miRNAs present in different non-target cells. In some embodiments, one or both of the first miRNA recognition site and second miRNA recognition site are recognized by miRNAs of Table 4. In some embodiments, one or more of the miRNA recognition sites on the fusosome nucleic acid (e.g. retroviral nucleic acid) are transcribed in cis with the exogenous agent. In some embodiments, one or more of the miRNA recognition sites on the fusosome nucleic acid (e.g., retroviral nucleic acid) are situated downstream of the poly A tail sequence, e.g., between the poly A tail sequence and the WPRE. In some embodiments, one or more of the miRNA recognition sites on the fusosome nucleic acid (e.g., retroviral nucleic acid) are situated downstream of the WPRE.

### V. Immune Modulation

[0576] In some embodiments, a fusosome, e.g. retroviral vector, or VLP, described herein comprises elevated CD47. See, e.g., U.S. Pat. No. 9,050,269, which is herein incorporated by reference in its entirety. In some embodiments, a fusosome, e.g. a retroviral vector or VLP, described herein comprises elevated Complement Regulatory protein. See, e.g., ES2627445T3 and U.S. Pat. No. 6,790,641, each of which is incorporated herein by reference in its entirety. In some embodiments, a fusosome, e.g. a retroviral vector, or VLP, described herein lacks or comprises reduced levels of an MHC protein, e.g., an MHC-1 class 1 or class II. See, e.g., US20170165348, which is herein incorporated by reference in its entirety.

[0577] Sometimes fusosomes, e.g. retroviral vectors, or VLPs, are recognized by the subject's immune system. In the case of enveloped viral vector particles (e.g., retroviral vector particles), membrane-bound proteins that are displayed on the surface of the viral envelope may be recognized and the viral particle itself may be neutralised. Furthermore, on infecting a target cell, the viral envelope becomes integrated with the cell membrane and as a result viral envelope proteins may become displayed on or remain in close association with the surface of the cell. The immune system may therefore also target the cells which the viral vector particles have infected. Both effects may lead to a reduction in the efficacy of exogenous agent delivery by viral vectors.

[0578] A viral particle envelope typically originates in a membrane of the source cell. Therefore, membrane proteins that are expressed on the cell membrane from which the viral particle buds may be incorporated into the viral envelope.

[0579] The Immune Modulating Protein CD47

[0580] The internalization of extracellular material into cells is commonly performed by a process called endocytosis (Rabinovitch, 1995, Trends Cell Biol. 5(3):85-7; Silverstein, 1995, Trends Cell Biol. 5(3):141-2; Swanson et al., 1995, Trends Cell Biol. 5(3):89-93; Allen et al., 1996, J. Exp. Med. 184(2):627-37). Endocytosis may fall into two general categories: phagocytosis, which involves the uptake of particles, and pinocytosis, which involves the uptake of fluid and solutes.

[0581] Professional phagocytes have been shown to differentiate from non-self and self, based on studies with knockout mice lacking the membrane receptor CD47 (Oldenborg et al., 2000, Science 288(5473):2051-4). CD47 is a ubiquitous member of the Ig superfamily that interacts with the immune inhibitory receptor SIRPα (signal regulatory protein) found on macrophages (Fujioka et al., 1996, Mol. Cell. Biol. 16(12):6887-99; Veillette et al., 1998, J. Biol. Chem. 273(35):22719-28; Jiang et al., 1999, J. Biol. Chem. 274(2):559-62). Although CD47-SIRPα interactions appear to deactivate autologous macrophages in mouse, severe reductions of CD47 (perhaps 90%) are found on human blood cells from some Rh genotypes that show little to no evidence of anemia (Mouro-Chanteloup et al., 2003, Blood 101(1):338-344) and also little to no evidence of enhanced cell interactions with phagocytic monocytes (Arndt et al., 2004, Br. J. Haematol. 125(3):412-4).

[0582] In some embodiments, a fusosome, e.g. a retroviral vector, or VLP (e.g., a viral particle having a radius of less than about 1 μm, 400 nm, or 150 nm), comprises at least a biologically active portion of CD47, e.g., on an exposed surface of the fusosome, e.g. retroviral vector, or VLP. In some embodiments, the fusosome, e.g. retroviral vector (e.g., lentivirus), or VLP, includes a lipid coat. In embodiments, the amount of the biologically active CD47 in the fusosome, e.g. retroviral vector, or VLP, is between about 20-250, 20-50, 50-100, 100-150, 150-200, or 200-250 molecules/μm². In some embodiments, the CD47 is human CD47.

[0583] A method described herein can comprise evading phagocytosis of a particle by a phagocytic cell. The method may include expressing at least one peptide including at least a biologically active portion of CD47 in a fusosome, e.g. a retroviral vector, or VLP, so that, when the fusosome, e.g. retroviral vector, or VLP, comprising the CD47 is exposed to a phagocytic cell, the fusosome, e.g. viral particle, evades phacocytosis by the phagocytic cell, or shows decreased phagocytosis compared to an otherwise similar unmodified fusosome, e.g. retroviral vector, or VLP. In some embodiments, the half-life of the fusosome, e.g. retroviral vector, or VLP, in a subject is extended compared to an otherwise similar unmodified fusosome, e.g. retroviral vector, or VLP.

[0584] MHC Deletion

[0585] The major histocompatibility complex class I (MHC-I) is a host cell membrane protein that can be incorporated into viral envelopes and, because it is highly polymorphic in nature, it is a major target of the body's immune response (McDevitt H. O. (2000) Annu. Rev. Immunol. 18: 1-17). MHC-I molecules exposed on the plasma membrane of source cells can be incorporated in the viral particle envelope during the process of vector budding. These MHC-I molecules derived from the source cells and incorporated in the viral particles can in turn be transferred to the plasma membrane of target cells. Alternatively, the MHC-I molecules may remain in close association with the target cell membrane as a result of the tendency of viral particles to absorb and remain bound to the target cell membrane.

[0586] The presence of exogenous MHC-I molecules on or close to the plasma membrane of transduced cells may elicit an alloreactive immune response in subjects. This may lead to immune-mediated killing or phagocytosis of transduced cells either upon ex vivo gene transfer followed by administration of the transduced cells to the subject, or upon direct in vivo administration of the viral particles. Furthermore, in the case of in vivo administration of MHC-I bearing viral particles into the bloodstream, the viral particles may be neutralised by pre-existing MHC-I specific antibodies before reaching their target cells.

[0587] Accordingly, in some embodiments, a source cell is modified (e.g., genetically engineered) to decrease expression of MHC-I on the surface of the cell. In embodiments, the source comprises a genetically engineered disruption of a gene encoding β2-microglobulin (β2M). In embodiments, the source cell comprises a genetically engineered disruption of one or more genes encoding an MHC-I α chain. The cell may comprise genetically engineered disruptions in all copies of the gene encoding β2-microglobulin. The cell may comprise genetically engineered disruptions in all copies of the genes encoding an MHC-I α chain. The cell may comprise both genetically engineered disruptions of genes encoding β2-microglobulin and genetically engineered disruptions of genes encoding an MHC-I α chain. In some embodiments, the retroviral vector or VLP comprises a decreased number of surface-exposed MHC-I molecules. The number of surface-exposed MHC-I molecules may be decreased such that the immune response to the MHC-I is decreased to a therapeutically relevant degree. In some embodiments, the enveloped viral vector particle is substantially devoid of surface-exposed MHC-I molecules.

[0588] HLA-G/E Overexpression

[0589] In some embodiments, a retroviral vector or VLP displays on its envelope a tolerogenic protein, e.g., an ILT-2 or ILT-4 agonist, e.g., HLA-E or HLA-G or any other ILT-2 or ILT-4 agonist. In some embodiments, a retroviral vector or VLP has increased expression of HLA-E, HLA-G, ILT-2 or ILT-4 compared to a reference retrovirus, e.g., an unmodified retrovirus otherwise similar to the retrovirus.

[0590] In some embodiments, a retrovirus composition has decreased MHC Class I compared to an unmodified retrovirus and increased HLA-G compared to an unmodified retrovirus.

[0591] In some embodiments, the retroviral vector or VLP has an increase in expression of HLA-G or HLA-E, e.g., an increase in expression of 1%, 5%, 10%, 20%, 30%, 40%, 50%, 60%, 70%, 80%, 90%, or more of HLA-G or HLA-E, compared to a reference retrovirus, e.g., an unmodified retrovirus otherwise similar to the retrovirus, wherein expression of HLA-G or HLA-E is assayed in vitro using flow cytometry, e.g., FACS.

[0592] In some embodiments, the retrovirus with increased HLA-G expression demonstrates reduced immunogenicity, e.g., as measured by reduced immune cell infiltration, in a teratoma formation assay.

[0593] Complement Regulatory Proteins

[0594] Complement activity is normally controlled by a number of complement regulatory proteins (CRPs). These proteins prevent spurious inflammation and host tissue damage. One group of proteins, including CD55/decay accelerating factor (DAF) and CD46/membrane cofactor protein (MCP), inhibits the classical and alternative pathway C3/C5 convertase enzymes. Another set of proteins including CD59 regulates MAC assembly. CRPs have been used to prevent rejection of xenotransplanted tissues and have also been shown to protect viruses and viral vectors from complement inactivation.

[0595] Membrane resident complement control factors include, e.g., decay-accelerating factor (DAF) or CD55, factor H (FH)-like protein-1 (FHL-1), C4b-binding protein (C4BP), Complement receptor 1 (CD35), membrane cofactor protein (MCP) or CD46, and CD59 (protectin) (e.g., to prevent the formation of membrane attack complex (MAC) and protect cells from lysis).

[0596] Albumin Binding Protein

[0597] In some embodiments the lentivirus binds albumin. In some embodiments the lentivirus comprises on its surface a protein that binds albumin. In some embodiments the lentivirus comprises on its surface an albumin binding protein. In some embodiments the albumin binding protein is streptococcal Albumin Binding protein. In some embodiments the albumin binding protein is streptococcal Albumin Binding Domain.

[0598] Expression of Non-Fusogen Proteins on the Lentiviral Envelope

[0599] In some embodiments the lentivirus is engineered to comprise one or more proteins on its surface. In some embodiments the proteins affect immune interactions with a subject. In some embodiments the proteins affect the pharmacology of the lentivirus in the subject. In some embodiments the protein is a receptor. In some embodiments the protein is an agonist. In some embodiments the protein is a signaling molecule. In some embodiments, the protein on the lentiviral surface comprises OKT3 or IL7.

[0600] In some embodiments, comprises a mitogenic transmembrane protein and/or a cytokine-based transmembrane protein is present in the source cell, which can be incorporated into the retrovirus when it buds from the source cell membrane. The mitogenic transmembrane protein and/or a cytokine-based transmembrane protein can be expressed as a separate cell surface molecule on the source cell rather than being part of the viral envelope glycoprotein.

[0601] Exemplary Features

[0602] In some embodiments of any of the aspects described herein, the fusosome, e.g. retroviral vector, VLP, or pharmaceutical composition is substantially non-immunogenic. Immunogenicity can be quantified, e.g., as described herein.

[0603] In some embodiments, a retroviral vector or VLP fuses with a target cell to produce a recipient cell. In some embodiments, a recipient cell that has fused to one or more retroviral vectors or VLPs is assessed for immunogenicity. In embodiments, a recipient cell is analyzed for the presence of antibodies on the cell surface, e.g., by staining with an anti-IgM antibody. In other embodiments, immunogenicity is assessed by a PBMC cell lysis assay. In embodiments, a recipient cell is incubated with peripheral blood mononuclear cells (PBMCs) and then assessed for lysis of the cells by the PBMCs. In other embodiments, immunogenicity is assessed by a natural killer (NK) cell lysis assay. In embodiments, a recipient cell is incubated with NK cells and then assessed for lysis of the cells by the NK cells. In other embodiments, immunogenicity is assessed by a CD8+ T-cell lysis assay. In embodiments, a recipient cell is incubated with CD8+ T-cells and then assessed for lysis of the cells by the CD8+ T-cells.

[0604] In some embodiments, the retroviral vector or VLP comprises elevated levels of an immunosuppressive agent (e.g., immunosuppressive protein) as compared to a reference retroviral vector or VLP, e.g., one produced from an unmodified source cell otherwise similar to the source cell, or a HEK293 cell. In some embodiments, the elevated level is at least 5%, 10%, 20%, 30%, 40%, 50%, 60%, 70%, 80%, 90%, 2-fold, 3-fold, 5-fold, 10-fold, 20-fold, 50-fold, or 100-fold. In some embodiments, the retroviral vector or VLP comprises an immunosuppressive agent that is absent from the reference cell. In some embodiments, the retroviral vector or VLP comprises reduced levels of an immunostimulatory agent (e.g., immunostimulatory protein) as compared to a reference retroviral vector or VLP, e.g., one produced from an unmodified source cell otherwise similar to the source cell, or a HEK293 cell. In some embodiments, the reduced level is at least 5%, 10%, 20%, 30%, 40%, 50%, 60%, 70%, 80%, 90%, 95%, 98%, or 99% compared to the reference retroviral vector or VLP. In some embodiments, the immunostimulatory agent is substantially absent from the retroviral vector or VLP.

[0605] In some embodiments, the retroviral vector or VLP, or the source cell from which the retroviral vector or VLP is derived, has one, two, three, four, five, six, seven, eight, nine, ten, eleven, twelve, or more of the following characteristics:
[0606] a. less than 50%, 40%, 30%, 20%, 15%, 10%, or 5% or lesser expression of MHC class I or MHC class II, compared to a reference retroviral vector or VLP, e.g., an unmodified retroviral vector or VLP from a source cell otherwise similar to the source cell, or a HeLa cell, or a HEK293 cell;
[0607] b. less than 50%, 40%, 30%, 20%, 15%, 10%, or 5% or lesser expression of one or more co-stimulatory proteins including but not limited to: LAG3, ICOS-L, ICOS, Ox40L, OX40, CD28, B7, CD30, CD30L 4-1BB, 4-1BBL, SLAM, CD27, CD70, HVEM, LIGHT, B7-H3, or B7-H4, compared to a reference retroviral vector or VLP, e.g., an unmodified retroviral vector or VLP from a cell otherwise similar to the source cell, or a HEK cell, or a reference cell described herein;
[0608] c. expression of surface proteins which suppress macrophage engulfment e.g., CD47, e.g., detectable expression by a method described herein, e.g., more than 1.5-fold, 2-fold, 3-fold, 4-fold, 5-fold, 10-fold, or more expression of the surface protein which suppresses macrophage engulfment, e.g., CD47, compared to a reference retroviral vector or VLP, e.g., an unmodified retroviral vector or VLP from a cell otherwise similar to the source cell, a Jurkat cell, or a HEK293 cell;
[0609] d. expression of soluble immunosuppressive cytokines, e.g., IL-10, e.g., detectable expression by a method described herein, e.g., more than 1.5-fold, 2-fold, 3-fold, 4-fold, 5-fold, 10-fold, or more expression of soluble immunosuppressive cytokines, e.g., IL-10, compared to a reference retroviral vector or VLP, e.g., an unmodified retroviral vector or VLP from a cell otherwise similar to the source cell, or a HEK293 cell;
[0610] e. expression of soluble immunosuppressive proteins, e.g., PD-L1, e.g., detectable expression by a method described herein, e.g., more than 1.5-fold, 2-fold, 3-fold, 4-fold, 5-fold, 10-fold, or more expression of soluble immunosuppressive proteins, e.g., PD-L1, compared to a reference retroviral vector or VLP, e.g., an unmodified retroviral vector or VLP from a cell otherwise similar to the source cell, or a HEK293 cell;
[0611] f. less than 50%, 40%, 30%, 20%, 15%, 10%, or 5% or lesser expression of soluble immune stimulating cytokines, e.g., IFN-gamma or TNF-a, compared to a reference retroviral vector or VLP, e.g., an unmodified retroviral vector or VLP from a cell otherwise similar to the source cell, or a HEK293 cell or a U-266 cell;
[0612] g. less than 50%, 40%, 30%, 20%, 15%, 10%, or 5% or lesser expression of endogenous immune-stimulatory antigen, e.g., Zg16 or Hormad1, compared to a reference retroviral vector or VLP, e.g., an unmodified retroviral vector or VLP from a cell otherwise similar to the source cell, or a HEK293 cell or an A549 cell, or a SK-BR-3 cell;
[0613] h. expression of, e.g., detectable expression by a method described herein, HLA-E or HLA-G, compared to a reference retroviral vector or VLP, e.g., an unmodified retroviral vector or VLP from a cell otherwise similar to the source cell, a HEK293 cell, or a or a Jurkat cell;
[0614] i. surface glycosylation profile, e.g., containing sialic acid, which acts to, e.g., suppress NK cell activation;
[0615] j. less than 50%, 40%, 30%, 20%, 15%, 10%, or 5% or lesser expression of TCRα/β, compared to a reference retroviral vector or VLP, e.g., an unmodified retroviral vector or VLP from a cell otherwise similar to the source cell, a HEK293 cell, or a Jurkat cell;
[0616] k. less than 50%, 40%, 30%, 20%, 15%, 10%, or 5% or lesser expression of ABO blood groups, compared to a reference retroviral vector or VLP, e.g., an unmodified retroviral vector or VLP from a cell otherwise similar to the source cell, a HEK293 cell, or a HeLa cell;
[0617] l. less than 50%, 40%, 30%, 20%, 15%, 10%, or 5% or lesser expression of Minor Histocompatibility Antigen (MHA), compared to a reference retroviral vector or VLP, e.g., an unmodified retroviral vector or VLP from a cell otherwise similar to the source cell, a HEK293 cell, or a Jurkat cell; or
[0618] m. has less than 10%, 9%, 8%, 7%, 6%, 5%, 4%, 3%, 2%, 1%, or less, of mitochondrial MHAs, compared to a reference retroviral vector or VLP e.g., an unmodified retroviral vector or VLP from a cell otherwise similar to the source cell, a HEK293 cell, or a Jurkat cell, or has no detectable mitochondrial MHAs.

[0619] In embodiments, the co-stimulatory protein is 4-1BB, B7, SLAM, LAG3, HVEM, or LIGHT, and the reference cell is HDLM-2. In some embodiments, the co-stimulatory protein is BY-H3 and the reference cell is HeLa. In some embodiments, the co-stimulatory protein is ICOSL or B7-H4, and the reference cell is SK-BR-3. In some embodiments, the co-stimulatory protein is ICOS or OX40, and the reference cell is MOLT-4. In some embodiments, the co-stimulatory protein is CD28, and the reference cell is U-266. In some embodiments, the co-stimulatory protein is CD3OL or CD27, and the reference cell is Daudi.

[0620] In some embodiments, the retroviral vector, VLP, or pharmaceutical composition does not substantially elicit an immunogenic response by the immune system, e.g., innate immune system. In embodiments, an immunogenic response can be quantified, e.g., as described herein. In some embodiments, an immunogenic response by the innate immune system comprises a response by innate immune cells including, but not limited to NK cells, macrophages, neutrophils, basophils, eosinophils, dendritic cells, mast cells, or gamma/delta T cells. In some embodiments, an immunogenic response by the innate immune system comprises a response by the complement system which includes soluble blood components and membrane bound components.

[0621] In some embodiments, the retroviral vector, VLP, or pharmaceutical composition does not substantially elicit an immunogenic response by the immune system, e.g., adaptive immune system. In some embodiments, an immunogenic response by the adaptive immune system comprises an immunogenic response by an adaptive immune cell including, but not limited to a change, e.g., increase, in number or activity of T lymphocytes (e.g., CD4 T cells, CD8 T cells, and or gamma-delta T cells), or B lymphocytes. In some embodiments, an immunogenic response by the adaptive immune system includes increased levels of soluble blood components including, but not limited to a change, e.g., increase, in number or activity of cytokines or antibodies (e.g., IgG, IgM, IgE, IgA, or IgD).

[0622] In some embodiments, the retroviral vector, VLP, or pharmaceutical composition is modified to have reduced immunogenicity. In some embodiments, the retroviral vector, VLP, or pharmaceutical composition has an immunogenicity less than 5%, 10%, 20%, 30%, 40%, or 50% lesser than the immunogenicity of a reference retroviral vector or VLP, e.g., an unmodified retroviral vector or VLP from a cell otherwise similar to the source cell, a HEK293 cell, or a Jurkat cell.

[0623] In some embodiments of any of the aspects described herein, the retroviral vector, VLP, or pharmaceutical composition is derived from a source cell, e.g., a mammalian cell, having a modified genome, e.g., modified using a method described herein, to reduce, e.g., lessen, immunogenicity. Immunogenicity can be quantified, e.g., as described herein.

[0624] In some embodiments, the retroviral vector, VLP, or pharmaceutical composition is derived from a mammalian cell depleted of, e.g., with a knock out of, one, two, three, four, five, six, seven or more of the following:
[0625] a. MHC class I, MHC class II or MHA;
[0626] b. one or more co-stimulatory proteins including but not limited to: LAG3, ICOS-L, ICOS, Ox40L, OX40, CD28, B7, CD30, CD30L 4-1BB, 4-1BBL, SLAM, CD27, CD70, HVEM, LIGHT, B7-H3, or B7-H4;
[0627] c. soluble immune-stimulating cytokines e.g., IFN-gamma or TNF-a;
[0628] d. endogenous immune-stimulatory antigen, e.g., Zg16 or Hormad1;
[0629] e. T-cell receptors (TCR);
[0630] f. The genes encoding ABO blood groups, e.g., ABO gene;
[0631] g. transcription factors which drive immune activation, e.g., NFkB;
[0632] h. transcription factors that control MHC expression e.g., class II trans-activator (CIITA), regulatory factor of the Xbox 5 (RFX5), RFX-associated protein (RFXAP), or RFX ankyrin repeats (RFXANK; also known as RFXB); or
[0633] i. TAP proteins, e.g., TAP2, TAP1, or TAPBP, which reduce MHC class I expression.

[0634] In some embodiments, the retroviral vector or VLP is derived from a source cell with a genetic modification which results in increased expression of an immunosuppressive agent, e.g., one, two, three or more of the following (e.g., wherein before the genetic modification the cell did not express the factor):
[0635] a. surface proteins which suppress macrophage engulfment, e.g., CD47; e.g., increased expression of CD47 compared to a reference retroviral vector or VLP, e.g., an unmodified retroviral vector or VLP from a cell otherwise similar to the source cell, a HEK293 cell, or a Jurkat cell;
[0636] b. soluble immunosuppressive cytokines, e.g., IL-10, e.g., increased expression of IL-10 compared to a reference retroviral vector or VLP, e.g., an unmodified retroviral vector or VLP from a cell otherwise similar to the source cell, a HEK293 cell, or a Jurkat cell;
[0637] c. soluble immunosuppressive proteins, e.g., PD-1, PD-L1, CTLA4, or BTLA; e.g., increased expression of immunosuppressive proteins compared to a reference retroviral vector or VLP, e.g., an unmodified retroviral vector or VLP from a cell otherwise similar to the cell source, a HEK293 cell, or a Jurkat cell;
[0638] d. a tolerogenic protein, e.g., an ILT-2 or ILT-4 agonist, e.g., HLA-E or HLA-G or any other endogenous ILT-2 or ILT-4 agonist, e.g., increased expression of HLA-E, HLA-G, ILT-2 or ILT-4 compared to a reference retroviral vector or VLP, e.g., an unmodified retroviral vector or VLP from a cell otherwise similar to the source cell, a HEK293 cell, or a Jurkat cell; or
[0639] e. surface proteins which suppress complement activity, e.g., complement regulatory proteins, e.g. proteins that bind decay-accelerating factor (DAF, CD55), e.g. factor H (FH)-like protein-1 (FHL-1), e.g. C4b-binding protein (C4BP), e.g. complement receptor 1 (CD35), e.g. Membrane cofactor protein (MCP, CD46), eg. Profectin (CD59), e.g. proteins that inhibit the classical and alternative compelement pathway CD/C5 convertase enzymes, e.g. proteins that regulate MAC assembly; e.g. increased expression of a complement regulatory protein compared to a reference retroviral vector or VLP, e.g. an unmodified retroviral vector or VLP from a cell otherwise similar to the source cell, a HEK293 cell, or a Jurkat cell.

[0640] In some embodiments, the increased expression level is at least 5%, 10%, 20%, 30%, 40%, 50%, 60%, 70%, 80%, 90%, 2-fold, 3-fold, 5-fold, 10-fold, 20-fold, 50-fold, or 100-fold higher as compared to a reference retroviral vector or VLP.

[0641] In some embodiments, the retroviral vector or VLP is derived from a source cell modified to have decreased expression of an immunostimulatory agent, e.g., one, two, three, four, five, six, seven, eight or more of the following:
[0642] a. less than 50%, 40%, 30%, 20%, 15%, 10%, or 5% or lesser expression of MHC class I or MHC class II, compared to a reference retroviral vector or VLP, e.g., an unmodified retroviral vector or VLP from a cell otherwise similar to the source cell, a HEK293 cell, or a HeLa cell;
[0643] b. less than 50%, 40%, 30%, 20%, 15%, 10%, or 5% or lesser expression of one or more co-stimulatory proteins including but not limited to: LAG3, ICOS-L, ICOS, Ox40L, OX40, CD28, B7, CD30, CD30L 4-1BB, 4-1BBL, SLAM, CD27, CD70, HVEM, LIGHT, B7-H3, or B7-H4, compared to a reference retroviral vector or VLP, e.g., an unmodified retroviral vector or VLP from a cell otherwise similar to the source cell, a HEK293 cell, or a reference cell described herein;
[0644] c. less than 50%, 40%, 30%, 20%, 15%, 10%, or 5% or lesser expression of soluble immune stimulating cytokines, e.g., IFN-gamma or TNF-a, compared to a reference retroviral vector or VLP, e.g., an unmodified retroviral vector or VLP from a cell otherwise similar to the source cell, a HEK293 cell, or a U-266 cell;
[0645] d. less than 50%, 40%, 30%, 20%, 15%, 10%, or 5% or lesser expression of endogenous immune-stimulatory antigen, e.g., Zg16 or Hormad1, compared to a reference retroviral vector or VLP, e.g., an unmodified retroviral vector or VLP from a cell otherwise similar to the source cell, a HEK293 cell, or an A549 cell or a SK-BR-3 cell;
[0646] e. less than 50%, 40%, 30%, 20%, 15%, 10%, or 5% or lesser expression of T-cell receptors (TCR) compared to a reference retroviral vector or VLP, e.g., an unmodified retroviral vector or VLP from a cell otherwise similar to the source cell, a HEK293 cell, or a Jurkat cell;
[0647] f. less than 50%, 40%, 30%, 20%, 15%, 10%, or 5% or lesser expression of ABO blood groups, compared to a reference retroviral vector or VLP, e.g., an unmodified retroviral vector or VLP from a cell otherwise similar to the source cell, a HEK293 cell, or a HeLa cell;
[0648] g. less than 50%, 40%, 30%, 20%, 15%, 10%, or 5% or lesser expression of transcription factors which drive immune activation, e.g., NFkB; compared to a reference retroviral vector or VLP, e.g., an unmodified retroviral vector or VLP from a cell otherwise similar to the source cell, a HEK293 cell, or a Jurkat cell
[0649] h. less than 50%, 40%, 30%, 20%, 15%, 10%, or 5% or lesser expression of transcription factors that control MHC expression, e.g., class II trans-activator (CIITA), regulatory factor of the Xbox 5 (RFX5), RFX-associated protein (RFXAP), or RFX ankyrin repeats (RFXANK; also known as RFXB) compared to a reference retroviral vector or VLP, e.g., an unmodified retroviral vector or VLP from a cell otherwise similar to the source cell, a HEK293 cell, or a Jurkat cell; or
[0650] i. less than 50%, 40%, 30%, 20%, 15%, 10%, or 5% or lesser expression of TAP proteins, e.g., TAP2, TAP1, or TAPBP, which reduce MHC class I expression compared to a reference retroviral vector or VLP, e.g., an unmodified retroviral vector or VLP from a cell otherwise similar to the source cell, a HEK293 cell, or a HeLa cell.

[0651] In some embodiments, a retroviral vector, VLP, or pharmaceutical composition derived from a mammalian cell, e.g., a HEK293, modified using shRNA expressing lentivirus to decrease MHC Class I expression, has lesser expression of MHC Class I compared to an unmodified retroviral vector or VLP, e.g., a retroviral vector or VLP from a cell (e.g., mesenchymal stem cell) that has not been modified. In some embodiments, a retroviral vector or VLP derived from a mammalian cell, e.g., a HEK293, modified using lentivirus expressing HLA-G to increase expression of HLA-G, has increased expression of HLA-G compared to an unmodified retroviral vector or VLP, e.g., from a cell (e.g., a HEK293) that has not been modified.

[0652] In some embodiments, the retroviral vector, VLP, or pharmaceutical composition is derived from a source cell, e.g., a mammalian cell, which is not substantially immunogenic, wherein the source cells stimulate, e.g., induce, T-cell IFN-gamma secretion, at a level of 0 pg/mL to >0 pg/mL, e.g., as assayed in vitro, by IFN-gamma ELISPOT assay.

[0653] In some embodiments, the retroviral vector, VLP, or pharmaceutical composition is derived from a source cell, e.g., a mammalian cell, wherein the mammalian cell is from a cell culture treated with an immunosuppressive agent, e.g., a glucocorticoid (e.g., dexamethasone), cytostatic (e.g., methotrexate), antibody (e.g., Muromonab-CD3), or immunophilin modulator (e.g., Ciclosporin or rapamycin).

[0654] In some embodiments, the retroviral vector, VLP, or pharmaceutical composition is derived from a source cell, e.g., a mammalian cell, wherein the mammalian cell comprises an exogenous agent, e.g., a therapeutic agent.

[0655] In some embodiments, the retroviral vector, VLP, or pharmaceutical composition is derived from a source cell, e.g., a mammalian cell, wherein the mammalian cell is a recombinant cell.

[0656] In some embodiments, the retroviral vector, VLP, or pharmaceutical is derived from a mammalian cell genetically modified to express viral immunoevasins, e.g., hCMV US2, or US11.

[0657] In some embodiments, the surface of the retroviral vector or VLP, or the surface of the source cell, is covalently or non-covalently modified with a polymer, e.g., a biocompatible polymer that reduces immunogenicity and immune-mediated clearance, e.g., PEG.

[0658] In some embodiments, the surface of the retroviral vector or VLP, or the surface of the source cell is covalently or non-covalently modified with a sialic acid, e.g., a sialic acid comprising glycopolymers, which contain NK-suppressive glycan epitopes.

[0659] In some embodiments, the surface of the retroviral vector or VLP, or the surface of the source cell is enzymatically treated, e.g., with glycosidase enzymes, e.g., α-N-acetylgalactosaminidases, to remove ABO blood groups

[0660] In some embodiments, the surface of the retroviral vector or VLP, or the surface of the source cell is enzymatically treated, to give rise to, e.g., induce expression of, ABO blood groups which match the recipient's blood type.

[0661] Parameters for Assessing Immunogenicity

[0662] In some embodiments, the retroviral vector or VLP is derived from a source cell, e.g., a mammalian cell which is not substantially immunogenic, or modified, e.g., modified using a method described herein, to have a reduction in immunogenicity. Immunogenicity of the source cell and the retroviral vector or VLP can be determined by any of the assays described herein.

[0663] In some embodiments, the retroviral vector or VLP has an increase, e.g., an increase of 1%, 5%, 10%, 20%, 30%, 40%, 50%, 60%, 70%, 80%, 90%, or more, in in vivo graft survival compared to a reference retroviral vector or VLP, e.g., an unmodified retroviral vector or VLP from a cell otherwise similar to the source cell.

[0664] In some embodiments, the retroviral vector or VLP has a reduction in immunogenicity as measured by a reduction in humoral response following one or more implantation of the retroviral vector or VLP into an appropriate animal model, e.g., an animal model described herein, compared to a humoral response following one or more implantation of a reference retroviral vector or VLP, e.g., an unmodified retroviral vector or VLP from a cell otherwise similar to the source cell, into an appropriate animal model, e.g., an animal model described herein. In some embodiments, the reduction in humoral response is measured in a serum sample by an anti-cell antibody titre, e.g., anti-retroviral or anti-VLP antibody titre, e.g., by ELISA. In some embodiments, the serum sample from animals administered the retroviral vector or VLP has a reduction of 1%, 5%, 10%, 20%, 30%, 40%, 50%, 60%, 70%, 80%, 90%, or more of an anti-retroviral or anti-VLP antibody titer compared to the serum sample from animals administered an unmodified retroviral vector or VLP. In some embodiments, the serum sample from animals administered the retroviral vector or VLP has an increased anti-retroviral or anti-VLP antibody titre, e.g., increased by 1%, 2%, 5%, 10%, 20%, 30%, or 40% from baseline, e.g., wherein baseline refers to serum sample from the same animals before administration of the retroviral vector or VLP.

[0665] In some embodiments, the retroviral vector or VLP has a reduction in macrophage phagocytosis, e.g., a reduction of 1%, 5%, 10%, 20%, 30%, 40%, 50%, 60%, 70%, 80%, 90%, or more in macrophage phagocytosis compared to a reference retroviral vector or VLP, e.g., an unmodified retroviral vector or VLP from a cell otherwise similar to the source cell, wherein the reduction in macrophage phagocytosis is determined by assaying the phagocytosis index in vitro, e.g., as described in Example 8. In some embodiments, the retroviral vector or VLP has a phagocytosis index of 0, 1, 10, 100, or more, e.g., as measured by an assay of Example 8, when incubated with macrophages in an in vitro assay of macrophage phagocytosis.

[0666] In some embodiments, the source cell or recipient cell has a reduction in cytotoxicity mediated cell lysis by PBMCs, e.g., a reduction of 1%, 5%, 10%, 20%, 30%, 40%, 50%, 60%, 70%, 80%, 90%, or more in cell lysis compared to a reference cell, e.g., an unmodified cell otherwise similar to the source cell, or a recipient cell that received an unmodified retroviral vector or VLP, or a mesenchymal stem cells, e.g., using an assay of Example 17. In embodiments, the source cell expresses exogenous HLA-G.

[0667] In some embodiments, the source cell or recipient cell has a reduction in NK-mediated cell lysis, e.g., a reduction of 1%, 5%, 10%, 20%, 30%, 40%, 50%, 60%, 70%, 80%, 90%, or more in NK-mediated cell lysis compared to a reference cell, e.g., an unmodified cell otherwise similar to the source cell, or a recipient cell that received an unmodified retroviral vector or VLP, wherein NK-mediated cell lysis is assayed in vitro, by a chromium release assay or europium release assay, e.g., using an assay of Example 18.

[0668] In some embodiments, the source cell or recipient cell has a reduction in CD8+ T-cell mediated cell lysis, e.g., a reduction of 1%, 5%, 10%, 20%, 30%, 40%, 50%, 60%, 70%, 80%, 90%, or more in CD8 T cell mediated cell lysis compared to a reference cell, e.g., an unmodified cell otherwise similar to the source cell, or a recipient cell that received an unmodified retroviral vector or VLP, wherein CD8 T cell mediated cell lysis is assayed in vitro, by an assay of Example 19.

[0669] In some embodiments, the source cell or recipient cell has a reduction in CD4+ T-cell proliferation and/or activation, e.g., a reduction of 1%, 5%, 10%, 20%, 30%, 40%, 50%, 60%, 70%, 80%, 90%, or more compared to a reference cell, e.g., an unmodified cell otherwise similar to the source cell, or a recipient cell that received an unmodified retroviral vector or VLP, wherein CD4 T cell proliferation is assayed in vitro (e.g. co-culture assay of modified or unmodified mammalian source cell, and CD4+T-cells with CD3/CD28 Dynabeads).

[0670] In some embodiments, the retroviral vector or VLP causes a reduction in T-cell IFN-gamma secretion, e.g., a reduction of 1%, 5%, 10%, 20%, 30%, 40%, 50%, 60%, 70%, 80%, 90%, or more in T-cell IFN-gamma secretion compared to a reference retroviral vector or VLP, e.g., an unmodified retroviral vector or VLP from a cell otherwise similar to the source cell, wherein T-cell IFN-gamma secretion is assayed in vitro, e.g., by IFN-gamma ELISPOT.

[0671] In some embodiments, the retroviral vector or VLP causes a reduction in secretion of immunogenic cytokines, e.g., a reduction of 1%, 5%, 10%, 20%, 30%, 40%, 50%, 60%, 70%, 80%, 90%, or more in secretion of immunogenic cytokines compared to a reference retroviral vector or VLP, e.g., an unmodified retroviral vector or VLP from a cell otherwise similar to the source cell, wherein secretion of immunogenic cytokines is assayed in vitro using ELISA or ELISPOT.

[0672] In some embodiments, the retroviral vector or VLP results in increased secretion of an immunosuppressive cytokine, e.g., an increase of 1%, 5%, 10%, 20%, 30%, 40%, 50%, 60%, 70%, 80%, 90%, or more in secretion of an immunosuppressive cytokine compared to a reference retroviral vector or VLP, e.g., an unmodified retroviral vector or VLP from a cell otherwise similar to the source cell, wherein secretion of the immunosuppressive cytokine is assayed in vitro using ELISA or ELISPOT.

[0673] In some embodiments, the retroviral vector or VLP has an increase in expression of HLA-G or HLA-E, e.g., an increase in expression of 1%, 5%, 10%, 20%, 30%, 40%, 50%, 60%, 70%, 80%, 90%, or more of HLA-G or HLA-E, compared to a reference retroviral vector or VLP, e.g., an unmodified retroviral vector or VLP from a cell otherwise similar to the source cell, wherein expression of HLA-G or HLA-E is assayed in vitro using flow cytometry, e.g., FACS. In some embodiments, the retroviral vector or VLP is derived from a source cell which is modified to have an increased expression of HLA-G or HLA-E, e.g., compared to an unmodified cell, e.g., an increased expression of 1%, 5%, 10%, 20%, 30%, 40%, 50%, 60%, 70%, 80%, 90%, or more of HLA-G or HLA-E, wherein expression of HLA-G or HLA-E is assayed in vitro using flow cytometry, e.g., FACS. In some embodiments, the retroviral vector or VLP derived from a modified cell with increased HLA-G expression demonstrates reduced immunogenicity.

[0674] In some embodiments, the retroviral vector or VLP has or causes an increase in expression of T cell inhibitor ligands (e.g. CTLA4, PD1, PD-L1), e.g., an increase in expression of 1%, 5%, 10%, 20%, 30%, 40%, 50%, 60%, 70%, 80%, 90%, or more of T cell inhibitor ligands as compared to a reference retroviral vector or VLP, e.g., an unmodified retroviral vector or VLP from a cell otherwise similar to the source cell, wherein expression of T cell inhibitor ligands is assayed in vitro using flow cytometry, e.g., FACS.

[0675] In some embodiments, the retroviral vector or VLP has a decrease in expression of co-stimulatory ligands, e.g., a decrease of 1%, 5%, 10%, 20%, 30%, 40%, 50%, 60%, 70%, 80%, 90%, or more in expression of co-stimulatory ligands compared to a reference retroviral vector or VLP, e.g., an unmodified retroviral vector or VLP from a cell otherwise similar to the source cell, wherein expression of co-stimulatory ligands is assayed in vitro using flow cytometry, e.g., FACS.

[0676] In some embodiments, the retroviral vector or VLP has a decrease in expression of MHC class I or MHC class II, e.g., a decrease in expression of 1%, 5%, 10%, 20%, 30%, 40%, 50%, 60%, 70%, 80%, 90%, or more of MHC Class I or MHC Class II compared to a reference retroviral vector or VLP, e.g., an unmodified retroviral vector or VLP from a cell otherwise similar to the source cell or a HeLa cell, wherein expression of MHC Class I or II is assayed in vitro using flow cytometry, e.g., FACS.

[0677] In some embodiments, the retroviral vector or VLP is derived from a cell source, e.g., a mammalian cell source, which is substantially non-immunogenic. In some embodiments, immunogenicity can be quantified, e.g., as described herein. In some embodiments, the mammalian cell source comprises any one, all or a combination of the following features:

[0678] a. wherein the source cell is obtained from an autologous cell source; e.g., a cell obtained from a recipient who will be receiving, e.g., administered, the retroviral vector or VLP;

[0679] b. wherein the source cell is obtained from an allogeneic cell source which is of matched, e.g., similar, gender to a recipient, e.g., a recipient described herein who will be receiving, e.g., administered; the retroviral vector or VLP;

[0680] c. wherein the source cell is obtained is from an allogeneic cell source is which is HLA matched with a recipient's HLA, e.g., at one or more alleles;

[0681] d. wherein the source cell is obtained is from an allogeneic cell source which is an HLA homozygote;

[0682] e. wherein the source cell is obtained is from an allogeneic cell source which lacks (or has reduced levels compared to a reference cell) MHC class I and II; or

[0683] f. wherein the source cell is obtained is from a cell source which is known to be substantially non-immunogenic including but not limited to a stem cell, a mesenchymal stem cell, an induced pluripotent stem cell, an embryonic stem cell, a sertoli cell, or a retinal pigment epithelial cell.

[0684] In some embodiments, the subject to be administered the retroviral vector or VLP has, or is known to have, or is tested for, a pre-existing antibody (e.g., IgG or IgM) reactive with a retroviral vector or VLP. In some embodiments, the subject to be administered the retroviral vector or VLP does not have detectable levels of a pre-existing antibody reactive with the retroviral vector or VLP. Tests for the antibody are described, e.g., in Example 13.

[0685] In some embodiments, a subject that has received the retroviral vector or VLP has, or is known to have, or is tested for, an antibody (e.g., IgG or IgM) reactive with a retroviral vector or VLP. In some embodiments, the subject that received the retroviral vector or VLP (e.g., at least once, twice, three times, four times, five times, or more) does not have detectable levels of antibody reactive with the retroviral vector or VLP. In embodiments, levels of antibody do not rise more than 1%, 2%, 5%, 10%, 20%, or 50% between two timepoints, the first timepoint being before the first administration of the retroviral vector or VLP, and the second timepoint being after one or more administrations of the retroviral vector or VLP. Tests for the antibody are described, e.g., in Example 14.

### VI. Exogenous Agents

[0686] In some embodiments, fusosome, e.g. a retroviral vector, VLP, or pharmaceutical composition described herein contains an exogenous agent. In some embodiments, the fusosome, e.g. a retroviral vector, VLP, or pharmaceutical composition described herein contains a nucleic acid that encodes an exogenous agent.

### A. Exogenous Protein Agents

[0687] In some embodiments, the exogenous agent comprises a cytosolic protein, e.g., a protein that is produced in the recipient cell and localizes to the recipient cell cytoplasm. In some embodiments, the exogenous agent comprises a secreted protein, e.g., a protein that is produced and secreted by the recipient cell. In some embodiments, the exogenous agent comprises a nuclear protein, e.g., a protein that is produced in the recipient cell and is imported to the nucleus of the recipient cell. In some embodiments, the exogenous agent comprises an organellar protein (e.g., a mitochondrial protein), e.g., a protein that is produced in the recipient cell and is imported into an organelle (e.g., a mitochondrial) of the recipient cell. In some embodiments, the protein is a wild-type protein or a mutant protein. In some embodiments the protein is a fusion or chimeric protein.

[0688] In some embodiments, the exogenous agent is encoded by a gene from among SYNE1, SETX, FMR1, SLC6A8, UBE3A, SOD1, TDP43, C9orf72, FXN, MECP2, ASPA, ALDH7A1, TPP1, FUCA1, GALC, HEXA, HEXB, MANBA, ARSA, GNPTAB, or MCOLN1. In some embodiments, the exogenous agent is encoded by a gene from among In some embodiments, the exogenous agent is encoded by a gene from among SYNE1, SETX, FMR1, SLC6A8, UBE3A, SOD1, TDP43, C9orf72, FXN, MECP2, ASPA, or ALDH7A1. In some embodiments, the exogenous agent is encoded by a gene from among TPP1, FUCA1, GALC, HEXA, HEXB, MANBA, ARSA, GNPTAB, or MCOLN1.

[0689] In some embodiments, the exogenous agent comprises a protein of Table 5 below. In some embodiments, the exogenous agent comprises the wild-type human sequence of any of the proteins of Table 5, a functional fragment thereof (e.g., an enzymatically active fragment thereof), or a functional variant thereof. In some embodiments, the exogenous agent comprises an amino acid sequence having at least 70%, 75%, 80%, 85%, 90%, 95%, 96%, 97%, 98%, or 99%, identity to an amino acid sequence of Table 5, e.g., a Uniprot Protein Accession Number sequence of column 2 of Table 5 or an amino acid sequence of column 3 of Table 5. In some embodiments, the payload gene encodes an an amino acid sequence having at least 70%, 75%, 80%, 85%, 90%, 95%, 96%, 97%, 98%, or 99%, identity to an amino acid sequence of Table 5.

TABLE 5
CNS diseases or disorders. The first column lists exogenous agents that can be
delivered to treat the indications in the fourth column, according to the
methods and uses herein. Each Uniprot accession number of Table 5 is herein
incorporated by reference in its entirety.

| | Uniprot | | | |
|---|---|---|---|---|
| | Protein(s) | | | SEQ |
| | Accession | Amino Acid Sequence (first | Disease/ | ID |
| Gene | Number | Uniprot Accession Number) | Disorder | NO |
| SYN | Q8NF91 | MATSRGASRCPRDIANVMQRLQDEQEIVQKRT | Spinocerebellar | 134 |
| E1 | | FTKWINSHLAKRKPPMVVDDLFEDMKDGVKL | Ataxia, | |
| | | LALLEVLSGQKLPCEQGRRMKRIHAVANIGTA | Autosomal | |
| | | LKFLEGRKIKLVNINSTDIADGRPSIVLGLMWTI | Recessive, | |
| | | ILYFQIEELTSNLPQLQSLSSSASSVDSIVSSETPS | Type 1 | |
| | | PPSKRKVTTKIQGNAKKALLKWVQYTAGKQT | | |
| | | GIEVKDFGKSWRSGVAFHSVIHAIRPELVDLET | | |
| | | VKGRSNRENLEDAFTIAETELGIPRLLDPEDVD | | |
| | | VDKPDEKSIMTYVAQFLKHYPDIHNASTDGQE | | |
| | | DDEILPGFPSFANSVQNFKREDRVIFKEMKVWI | | |
| | | EQFERDLTRAQMVESNLQDKYQSFKHFRVQY | | |
| | | EMKRKQIEHLIQPLHRDGKLSLDQALVKQSWD | | |
| | | RVTSRLFDWHIQLDKSLPAPLGTIGAWLYRAE | | |
| | | VALREEITVQQVHEETANTIQRKLEQHKDLLQ | | |
| | | NTDAHKRAFHEIYRTRSVNGIPVPPDQLEDMA | | |
| | | ERFHFVSSTSELHLMKMEFLELKYRLLSLLVLA | | |
| | | ESKLKSWIIKYGRRESVEQLLQNYVSFIENSKFF | | |
| | | EQYEVTYQILKQTAEMYVKADGSVEEAENVM | | |
| | | KFMNETTAQWRNLSVEVRSVRSMLEEVISNW | | |
| | | DRYGNTVASLQAWLEDAEKMLNQSENAKKD | | |
| | | FFRNLPHWIQQHTAMNDAGNFLIETCDEMVSR | | |
| | | DLKQQLLLLNGRWRELFMEVKQYAQADEMD | | |
| | | RMKKEYTDCVVTLSAFATEAHKKLSEPLEVSF | | |
| | | MNVKLLIQDLEDIEQRVPVMDAQYKIITKTAH | | |
| | | LITKESPQEEGKEMFATMSKLKEQLTKVKECY | | |
| | | SPLLYESQQLLIPLEELEKQMTSFYDSLGKINEII | | |
| | | TVLEREAQSSALFKQKHQELLACQENCKKTLT | | |
| | | LIEKGSQSVQKFVTLSNVLKHFDQTRLQRQIAD | | |
| | | IHVAFQSMVKKTGDWKKHVETNSRLMKKFEE | | |
| | | SRAELEKVLRIAQEGLEEKGDPEELLRRHTEFF | | |
| | | SQLDQRVLNAFLKACDELTDILPEQEQQGLQE | | |
| | | AVRKLHKQWKDLQGEAPYHLLHLKIDVEKNR | | |
| | | FLASVEECRTELDRETKLMPQEGSEKIIKEHRV | | |
| | | FFSDKGPHHLCEKRLQLIEELCVKLPVRDPVRD | | |
| | | TPGTCHVTLKELRAAIDSTYRKLMEDPDKWK | | |
| | | DYTSRFSEFSSWISTNETQLKGIKGEAIDTANH | | |
| | | GEVKRAVEEIRNGVTKRGETLSWLKSRLKVLT | | |
| | | EVSSENEAQKQGDELAKLSSSFKALVTLLSEVE | | |
| | | KMLSNFGDCVQYKEIVKNSLEELISGSKEVQE | | |
| | | QAEKILDTENLFEAQQLLLHHQQKTKRISAKK | | |
| | | RDVQQQIAQAQQGEGGLPDRGHEELRKLESTL | | |
| | | DGLERSRERQERRIQVTLRKWERFETNKETVV | | |
| | | RYLFQTGSSHERFLSFSSLESLSSELEQTKEFSK | | |
| | | RTESIAVQAENLVKEASEIPLGPQNKQLLQQQA | | |
| | | KSIKEQVKKLEDTLEEDIKTMEMVKTKWDHF | | |
| | | GSNFETLSVWITEKEKELNALETSSSAMDMQIS | | |
| | | QIKVTIQEIESKLSSIVGLEEEAQSFAQFVTTGES | | |
| | | ARIKAKLTQIRRYGEELREHAQCLEGTILGHLS | | |
| | | QQQKFEENLRKIQQSVSEFEDKLAVPIKICSSAT | | |
| | | ETYKVLQEHMDLCQALESLSSAITAFSASARK | | |
| | | VVNRDSCVQEAAALQQQYEDILRRAKERQTA | | |
| | | LENLLAHWQRLEKELSSFLTWLERGEAKASSP | | |
| | | EMDISADRVKVEGELQLIQALQNEVVSQASFY | | |
| | | SKLLQLKESLFSVASKDDVKMMKLHLEQLDE | | |
| | | RWRDLPQIINKRINFLQSVVAEHQQFDELLLSF | | |
| | | SVWIKLFLSELQTTSEISIMDHQVALTRHKDHA | | |
| | | AEVESKKGELQSLQGHLAKLGSLGRAEDLHLL | | |
| | | QGKAEDCFQLFEEASQVVERRQLALSHLAEFL | | |
| | | QSHASLSGILRQLRQTVEATNSMNKNESDLIEK | | |
| | | DLNDALQNAKALESAAVSLDGILSKAQYHLKI | | |
| | | GSSEQRTSCRATADQLCGEVERIQNLLGTKQSE | | |
| | | ADALAVLKKAFQDQKEELLKSIEDIEERTDKER | | |
| | | LKEPTRQALQQRLRVFNQLEDELNSHEHELCW | | |
| | | LKDKAKQIAQKDVAFAPEVDREINRLEVTWD | | |
| | | DTKRLIHENQGQCCGLIDLMREYQNLKSAVSK | | |
| | | VLENASSVIVTRTTIKDQEDLKWAFSKHETAK | | |
| | | NKMNYKQKDLDNFTSKGKHLLSELKKIHSSDF | | |
| | | SLVKTDMESTVDKWLDVSEKLEENMDRLRVS | | |
| | | LSIWDDVLSTRDEIEGWSNNCVPQMAENISNL | | |
| | | DNHLRAEELLKEFESEVKNKALRLEELHSKVN | | |
| | | DLKELTKNLETPPDLQFIEADLMQKLEHAKEIT | | |
| | | EVAKGTLKDFTAQSTQVEKFINDITTWFTKVEE | | |
| | | SLMNCAQNETCEALKKVKDIQKELQSQQSNIS | | |
| | | STQENLNSLCRKYHSAELESLGRAMTGLIKKH | | |
| | | EAVSQLCSKTQASLQESLEKHFSESMQEFQEW | | |
| | | FLGAKAAAKESSDRTGDSKVLEAKLHDLQNIL | | |
| | | DSVSDGQSKLDAVTQEGQTLYAHLSKQIVSSIQ | | |
| | | EQITKANEEFQAFLKQCLKDKQALQDCASELG | | |
| | | SFEDQHRKLNLWIHEMEERFNTENLGESKQHIP | | |
| | | EKKNEVHKVEMFLGELLAARESLDKLSQRGQ | | |
| | | LLSEEGHGAGQEGRLCSQLLTSHQNLLRMTKE | | |
| | | KLRSCQVALQEHEALEEALQSMWFWVKAIQD | | |
| | | RLACAESTLGSKDTLEKRLSQIQDILLMKGEGE | | |
| | | VKLNMAIGKGEQALRSSNKEGQRVIQTQLETL | | |
| | | KEVWADIMSSSVHAQSTLESVISQWNDYVERK | | |
| | | NQLEQWMESVDQKIEHPLQPQPGLKEKFVLLD | | |
| | | HLQSILSEAEDHTRALHRLIAKSRELYEKTEDE | | |
| | | SFKDTAQEELKTQFNDIMTVAKEKMRKVEEIV | | |
| | | KDHLMYLDAVHEFTDWLHSAKEELHRWSDM | | |
| | | SGDSSATQKKLSKIKELIDSREIGASRLSRVESL | | |
| | | APEVKQNTTASGCELMHTEMQALRADWKQW | | |
| | | EDSVFQTQSCLENLVSQMALSEQEFSGQVAQL | | |
| | | EQALEQFSALLKTWAQQLTLLEGKNTDEEIVE | | |
| | | CWHKGQEILDALQKAEPRTEDLKSQLNELCRF | | |
| | | SRDLSTYSGKVSGLIKEYNCLCLQASKGCQNK | | |
| | | EQILQQRFRKAFRDFQQWLVNAKITTAKCFDIP | | |
| | | QNISEVSTSLQKIQEFLSESENGQHKLNMMLSK | | |
| | | GELLSTLLTKEKAKGIQAKVTAAKEDWKNFHS | | |
| | | NLHQKESALENLKIQMKDFEVSAEPIQDWLSK | | |
| | | TEKMVHESSNRLYDLPAKRREQQKLQSVLEEI | | |
| | | HCYEPQLNRLKEKAQQLWEGQAASKSFRHRV | | |
| | | SQLSSQYLALSNLTKEKVSRLDRIVAEHNQFSL | | |
| | | GIKELQDWMTDAIHMLDSYCHPTSDKSVLDSR | | |
| | | TLKLEALLSVKQEKEIQMKMIVTRGESVLQNT | | |
| | | SPEGIPTIQQQLQSVKDMWASLLSAGIRCKSQL | | |
| | | EGALSKWTSYQDGVRQFSGWMDSMEANLNE | | |
| | | SERQHAELRDKTTMLGKAKLLNEEVLSYSSLL | | |
| | | ETIEVKGAGMTEHYVTQLELQDLQERYRAIQE | | |
| | | RAKEAVTKSEKLVRLHQEYQRDLKAFEVWLG | | |
| | | QEQEKLDQYSVLEGDAHTHETTLRDLQELQV | | |
| | | HCAEGQALLNSVLHTREDVIPSGIPQAEDRALE | | |
| | | SLRQDWQAYQHRLSETRTQFNNVVNKLRLME | | |
| | | QKFQQVDEWLKTAEEKVSPRTRRQSNRATKEI | | |
| | | QLHQMKKWHEEVTAYRDEVEEVGARAQEILD | | |
| | | ESHVNSRMGCQATQLTSRYQALLLQVLEQIKF | | |
| | | LEEEIQSLEESESSLSSYSDWYGSTHKNFKNVA | | |
| | | TKIDKVDTVMMGKKLKTLEVLLKDMEKGHSL | | |
| | | LKSAREKGERAVKYLEEGEAERLRKEIHDHME | | |
| | | QLKELTSTVRKEHMTLEKGLHLAKEFSDKCKA | | |
| | | LTQWIAEYQEILHVPEEPKMELYEKKAQLSKY | | |
| | | KSLQQTVLSHEPSVKSVREKGEALLELVQDVT | | |
| | | LKDKIDQLQSDYQDLCSIGKEHVFSLEAKVKD | | |
| | | HEDYNSELQEVEKWLLQMSGRLVAPDLLETSS | | |
| | | LETITQQLAHHKAMMEEIAGFEDRLNNLQMK | | |
| | | GDTLIGQCADHLQAKLKQNVHAHLQGTKDSY | | |
| | | SAICSTAQRMYQSLEHELQKHVSRQDTLQQCQ | | |
| | | AWLSAVQPDLEPSPQPPLSRAEAIKQVKHFRAL | | |
| | | QEQARTYLDLLCSMCDLSNASVKTTAKDIQQT | | |
| | | EQTIEQKLVQAQNLTQGWEEIKHLKSELWIYL | | |
| | | QDADQQLQNMKRRHSELELNIAQNMVSQVKD | | |
| | | FVKKLQSKQASVNTIIEKVNKLTKKEESPEHKE | | |
| | | INHLNDQWLDLCRQSNNLCLQREEDLQRTRD | | |
| | | YHDCMNVVEVFLEKFTTEWDNLARSDAESTA | | |
| | | VHLEALKKLALALQERKYAIEDLKDQKQKMIE | | |
| | | HLNLDDKELVKEQTSHLEQRWFQLEDLIKRKI | | |
| | | QVSVTNLEELNVVQSRFQELMEWAEEQQPNIA | | |
| | | EALKQSPPPDMAQNLLMDHLAICSELEAKQML | | |
| | | LKSLIKDADRVMADLGLNERQVIQKALSDAQS | | |
| | | HVNCLSDLVGQRRKYLNKALSEKTQFLMAVF | | |
| | | QATSQIQQHERKIMFREHICLLPDDVSKQVKTC | | |
| | | KSAQASLKTYQNEVTGLWAQGRELMKEVTEQ | | |
| | | EKSEVLGKLQELQSVYDSVLQKCSHRLQELEK | | |
| | | NLVSRKHFKEDFDKACHWLKQADIVTFPEINL | | |
| | | MNESSELHTQLAKYQNILEQSPEYENLLLTLQR | | |
| | | TGQTILPSLNEVDHSYLSEKLNALPRQFNVIVA | | |
| | | LAKDKFYKVQEAILARKEYASLIELTTQSLSEL | | |
| | | EAQFLRMSKVPTDLAVEEALSLQDGCRAILDE | | |
| | | VAGLGEAVDELNQKKEGFRSTGQPWQPDKML | | |
| | | HLVTLYHRLKRQTEQRVSLLEDTTSAYQEHEK | | |
| | | MCQQLERQLKSVKEEQSKVNEETLPAEEKLK | | |
| | | MYHSLAGSLQDSGIVLKRVTIHLEDLAPHLDPL | | |
| | | AYEKARHQIQSWQGELKLLTSAIGETVTECESR | | |
| | | MVQSIDFQTEMSRSLDWLRRVKAELSGPVYLD | | |
| | | LNLQDIQEEIRKIQIHQEEVQSSLRIMNALSHKE | | |
| | | KEKFTKAKELISADLEHSLAELSELDGDIQEAL | | |
| | | RTRQATLTEIYSQCQRYYQVFQAANDWLEDA | | |
| | | QELLQLAGNGLDVESAEENLKSHMEFFSTEDQ | | |
| | | FHSNLEELHSLVATLDPLIKPTGKEDLEQKVAS | | |
| | | LELRSQRMSRDSGAQVDLLQRCTAQWHDYQK | | |
| | | AREEVIELMNDTEKKLSEFSLLKTSSSHEAEEK | | |
| | | LSEHKALVSVVNSFHEKIVALEEKASQLEKTG | | |
| | | NDASKATLSRSMTTVWQRWTRLRAVAQDQE | | |
| | | KILEDAVDEWTGFNNKVKKATEMIDQLQDKL | | |
| | | PGSSAEKASKAELLTLLEYHDTFVLELEQQQSA | | |
| | | LGMLRQQTLSMLQDGAAPTPGEEPPLMQEITA | | |
| | | MQDRCLNMQEKVKTNGKLVKQELKDREMVE | | |
| | | TQINSVKCWVQETKEYLGNPTIEIDAQLEELQI | | |
| | | LLTEATNHRQNIEKMAEEQKEKYLGLYTILPSE | | |
| | | LSLQLAEVALDLKIRDQIQDKIKEVEQSKATSQ | | |
| | | ELSRQIQKLAKDLTTILTKLKAKTDNVVQAKT | | |
| | | DQKVLGEELDGCNSKLMELDAAVQKFLEQNG | | |
| | | QLGKPLAKKIGKLTELHQQTIRQAENRLSKLN | | |
| | | QAASHLEEYNEMLELILKWIEKAKVLAHGTIA | | |
| | | WNSASQLREQYILHQTLLEESKEIDSELEAMTE | | |
| | | KLQYLTSVYCTEKMSQQVAELGRETEELRQMI | | |
| | | KIRLQNLQDAAKDMKKFEAELKKLQAALEQA | | |
| | | QATLTSPEVGRLSLKEQLSHRQHLLSEMESLKP | | |
| | | KVQAVQLCQSALRIPEDVVASLPLCHAALRLQ | | |
| | | EEASRLQHTAIQQCNIMQEAVVQYEQYEQEM | | |
| | | KHLQQLIEGAHREIEDKPVATSNIQELQAQISR | | |
| | | HEELAQKIKGYQEQIASLNSKCKMLTMKAKH | | |
| | | ATMLLTVTEVEGLAEGTEDLDGELLPTPSAHPS | | |
| | | VVMMTAGRCHTLLSPVTEESGEEGTNSEISSPP | | |
| | | ACRSPSPVANTDASVNQDIAYYQALSAERLQT | | |
| | | DAAKIHPSTSASQEFYEPGLEPSATAKLGDLQR | | |
| | | SWETLKNVISEKQRTLYEALERQQKYQDSLQSI | | |
| | | STKMEAIELKLSESPEPGRSPESQMAEHQALM | | |
| | | DEILMLQDEINELQSSLAEELVSESCEADPAEQ | | |
| | | LALQSTLTVLAERMSTIRMKASGKRQLLEEKL | | |
| | | NDQLEEQRQEQALQRYRCEADELDSWLLSTK | | |
| | | ATLDTALSPPKEPMDMEAQLMDCQNMLVEIE | | |
| | | QKVVALSELSVHNENLLLEGKAHTKDEAEQL | | |
| | | AGKLRRLKGSLLELQRALHDKQLNMQGTAQE | | |
| | | KEESDVDLTATQSPGVQEWLAQARTTWTQQR | | |
| | | QSSLQQQKELEQELAEQKSLLRSVASRGEEILI | | |
| | | QHSAAETSGDAGEKPDVLSQELGMEGEKSSAE | | |
| | | DQMRMKWESLHQEFSTKQKLLQNVLEQEQEQ | | |
| | | VLYSRPNRLLSGVPLYKGDVPTQDKSAVTSLL | | |
| | | DGLNQAFEEVSSQSGGAKRQSIHLEQKLYDGV | | |
| | | SATSTWLDDVEERLFVATALLPEETETCLFNQE | | |
| | | ILAKDIKEMSEEMDKNKNLFSQAFPENGDNRD | | |
| | | VIEDTLGCLLGRLSLLDSVVNQRCHQMKERLQ | | |
| | | QILNFQNDLKVLFTSLADNKYIILQKLANVFEQ | | |
| | | PVAEQIEAIQQAEDGLKEFDAGIIELKRRGDKL | | |
| | | QVEQPSMQELSKLQDMYDELMMIIGSRRSGLN | | |
| | | QNLTLKSQYERALQDLADLLETGQEKMAGDQ | | |
| | | KIIVSSKEEIQQLLDKHKEYFQGLESHMILTETL | | |
| | | FRKIISFAVQKETQFHTELMAQASAVLKRAHK | | |
| | | RGVELEYILETWSHLDEDQQELSRQLEVVESSI | | |
| | | PSVGLVEENEDRLIDRITLYQHLKSSLNEYQPK | | |
| | | LYQVLDDGKRLLISISCSDLESQLNQLGECWLS | | |
| | | NTNKMSKELHRLETILKHWTRYQSESADLIHW | | |
| | | LQSAKDRLEFWTQQSVTVPQELEMVRDHLNA | | |
| | | FLEFSKEVDAQSSLKSSVLSTGNQLLRLKKVDT | | |
| | | ATLRSELSRIDSQWTDLLTNIPAVQEKLHQLQ | | |
| | | MDKLPSRHAISEVMSWISLMENVIQKDEDNIK | | |
| | | NSIGYKAIHEYLQKYKGFKIDINCKQLTVDFVN | | |
| | | QSVLQISSQDVESKRSDKTDFAEQLGAMNKSW | | |
| | | QILQGLVTEKIQLLEGLLESWSEYENNVQCLKT | | |
| | | WFETQEKRLKQQHRIGDQASVQNALKDCQDL | | |
| | | EDLIKAKEKEVEKIEQNGLALIQNKKEDVSSIV | | |
| | | MSTLRELGQTWANLDHMVGQLKILLKSVLDQ | | |
| | | WSSHKVAFDKINSYLMEARYSLSRFRLLTGSL | | |
| | | EAVQVQVDNLQNLQDDLEKQERSLQKFGSITN | | |
| | | QLLKECHPPVTETLTNTLKEVNMRWNNLLEEI | | |
| | | AEQLQSSKALLQLWQRYKDYSKQCASTVQQQ | | |
| | | EDRTNELLKAATNKDIADDEVATWIQDCNDLL | | |
| | | KGLGTVKDSLFFLHELGEQLKQQVDASAASAI | | |
| | | QSDQLSLSQHLCALEQALCKQQTSLQAGVLDY | | |
| | | ETFAKSLEALEAWIVEAEEILQGQDPSHSSDLS | | |
| | | TIQERMEELKGQMLKFSSMAPDLDRLNELGYR | | |
| | | LPLNDKEIKRMQNLNRHWSLISSQTTERFSKLQ | | |
| | | SFLLQHQTFLEKCETWMEFLVQTEQKLAVEIS | | |
| | | GNYQHLLEQQRAHELFQAEMFSRQQILHSIIID | | |
| | | GQRLLEQGQVDDRDEFNLKLTLLSNQWQGVI | | |
| | | RRAQQRRGIIDSQIRQWQRYREMAEKLRKWL | | |
| | | VEVSYLPMSGLGSVPIPLQQARTLFDEVQFKEK | | |
| | | VFLRQQGSYILTVEAGKQLLLSADSGAEAALQ | | |
| | | AELAEIQEKWKSASMRLEEQKKKLAFLLKDW | | |
| | | EKCEKGIADSLEKLRTFKKKLSQSLPDHHEELH | | |
| | | AEQMRCKELENAVGSWTDDLTQLSLLKDTLS | | |
| | | AYISADDISILNERVELLQRQWEELCHQLSLRR | | |
| | | QQIGERLNEWAVFSEKNKELCEWLTQMESKV | | |
| | | SQNGDILIEEMIEKLKKDYQEEIAIAQENKIQLQ | | |
| | | QMGERLAKASHESKASEIEYKLGKVNDRWQH | | |
| | | LLDLIAARVKKLKETLVAVQQLDKNMSSLRT | | |
| | | WLAHIESELAKPIVYDSCNSEEIQRKLNEQQEL | | |
| | | QRDIEKHSTGVASVLNLCEVLLHDCDACATDA | | |
| | | ECDSIQQATRNLDRRWRNICAMSMERRLKIEE | | |
| | | TWRLWQKFLDDYSRFEDWLKSSERTAAFPSSS | | |
| | | GVIYTVAKEELKKFEAFQRQVHECLTQLELINK | | |
| | | QYRRLARENRTDSACSLKQMVHEGNQRWDN | | |
| | | LQKRVTSILRRLKHFIGQREEFETARDSILVWL | | |
| | | TEMDLQLTNIEHFSECDVQAKIKQLKAFQQEIS | | |
| | | LNHNKIEQIIAQGEQLIEKSEPLDAAIIEEELDEL | | |
| | | RRYCQEVFGRVERYHKKLIRLPLPDDEHDLSD | | |
| | | RELELEDSAALSDLHWHDRSADSLLSPQPSSNL | | |
| | | SLSLAQPLRSERSGRDTPASVDSIPLEWDHDYD | | |
| | | LSRDLESAMSRALPSEDEEGQDDKDFYLRGAV | | |
| | | GLSGDHSALESQIRQLGKALDDSRFQIQQTENII | | |
| | | RSKTPTGPELDTSYKGYMKLLGECSSSIDSVKR | | |
| | | LEHKLKEEEESLPGFVNLHSTETQTAGVIDRWE | | |
| | | LLQAQALSKELRMKQNLQKWQQFNSDLNSIW | | |
| | | AWLGDTEEELEQLQRLELSTDIQTIELQIKKLK | | |
| | | ELQKAVDHRKAIILSINLCSPEFTQADSKESRDL | | |
| | | QDRLSQMNGRWDRVCSLLEEWRGLLQDALM | | |
| | | QCQGFHEMSHGLLLMLENIDRRKNEIVPIDSNL | | |
| | | DAEILQDHHKQLMQIKHELLESQLRVASLQDM | | |
| | | SCQLLVNAEGTDCLEAKEKVHVIGNRLKLLLK | | |
| | | EVSRHIKELEKLLDVSSSQQDLSSWSSADELDT | | |
| | | SGSVSPTSGRSTPNRQKTPRGKCSLSQPGPSVSS | | |
| | | PHSRSTKGGSDSSLSEPGPGRSGRGFLFRVLRA | | |
| | | ALPLQLLLLLLIGLACLVPMSEEDYSCALSNNF | | |
| | | ARSFHPMLRYTNGPPPL | | |
| SETX | Q7Z333 | MSTCCWCTPGGASTIDFLKRYASNTPSGEFQT | Ataxia with | 135 |
| | | ADEDLCYCLECVAEYHKARDELPFLHEVLWE | Oculomotor | |
| | | LETLRLINHFEKSMKAEIGDDDELYIVDNNGE | Apraxia, Type 2 | |
| | | MPLFDITGQDFENKLRVPLLEILKYPYLLLHER | | |
| | | VNELCVEALCRMEQANCSFQVFDKHPGIYLFL | | |
| | | VHPNEMVRRWAILTARNLGKVDRDDYYDLQE | | |
| | | VLLCLFKVIELGLLESPDIYTSSVLEKGKLILLPS | | |
| | | HMYDTTNYKSYWLGICMLLTILEEQAMDSLLL | | |
| | | GSDKQNDFMQSILHTMEREADDDSVDPFWPA | | |
| | | LHCFMVILDRLGSKVWGQLMDPIVAFQTIINN | | |
| | | ASYNREIRHIRNSSVRTKLEPESYLDDMVTCSQ | | |
| | | IVYNYNPEKTKKDSGWRTAICPDYCPNMYEE | | |
| | | METLASVLQSDIGQDMRVHNSTFLWFIPFVQS | | |
| | | LMDLKDLGVAYIAQVVNHLYSEVKEVLNQTD | | |
| | | AVCDKVTEFFLLILVSVIELHRNKKCLHLLWVS | | |
| | | SQQWVEAVVKCAKLPTTAFTRSSEKSSGNCSK | | |
| | | GTAMISSLSLHSMPSNSVQLAYVQLIRSLLKEG | | |
| | | YQLGQQSLCKRFWDKLNLFLRGNLSLGWQLT | | |
| | | SQETHELQSCLKQIIRNIKFKAPPCNTFVDLTSA | | |
| | | CKISPASYNKEESEQMGKTSRKDMHCLEASSP | | |
| | | TFSKEPMKVQDSVLIKADNTIEGDNNEQNYIK | | |
| | | DVKLEDHLLAGSCLKQSSKNIFTERAEDQIKIS | | |
| | | TRKQKSVKEISSYTPKDCTSRNGPERGCDRGII | | |
| | | VSTRLLTDSSTDALEKVSTSNEDFSLKDDALAK | | |
| | | TSKRKTKVQKDEICAKLSHVIKKQHRKSTLVD | | |
| | | NTINLDENLTVSNIESFYSRKDTGVQKGDGFIH | | |
| | | NLSLDPSGVLDDKNGEQKSQNNVLPKEKQLK | | |
| | | NEELVIFSFHENNCKIQEFHVDGKELIPFTEMTN | | |
| | | ASEKKSSPFKDLMTVPESRDEEMSNSTSVIYSN | | |
| | | LTREQAPDISPKSDTLTDSQIDRDLHKLSLLAQ | | |
| | | ASVITFPSDSPQNSSQLQRKVKEDKRCFTANQN | | |
| | | NVGDTSRGQVIIISDSDDDDDERILSLEKLTKQ | | |
| | | DKICLEREHPEQHVSTVNSKEEKNPVKEEKTET | | |
| | | LFQFEESDSQCFEFESSSEVFSVWQDHPDDNNS | | |
| | | VQDGEKKCLAPIANTTNGQGCTDYVSEVVKK | | |
| | | GAEGIEEHTRPRSISVEEFCEIEVKKPKRKRSEK | | |
| | | PMAEDPVRPSSSVRNEGQSDTNKRDLVGNDFK | | |
| | | SIDRRTSTPNSRIQRATTVSQKKSSKLCTCTEPI | | |
| | | RKVPVSKTPKKTHSDAKKGQNRSSNYLSCRTT | | |
| | | PAIVPPKKFRQCPEPTSTAEKLGLKKGPRKAYE | | |
| | | LSQRSLDYVAQLRDHGKTVGVVDTRKKTKLIS | | |
| | | PQNLSVRNNKKLLTSQELQMQRQIRPKSQKNR | | |
| | | RRLSDCESTDVKRAGSHTAQNSDIFVPESDRSD | | |
| | | YNCTGGTEVLANSNRKQLIKCMPSEPETIKAK | | |
| | | HGSPATDDACPLNQCDSVVLNGTVPTNEVIVS | | |
| | | TSEDPLGGGDPTARHIEMAALKEGEPDSSSDAE | | |
| | | EDNLFLTQNDPEDMDLCSQMENDNYKLIELIH | | |
| | | GKDTVEVEEDSVSRPQLESLSGTKCKYKDCLE | | |
| | | TTKNQGEYCPKHSEVKAADEDVFRKPGLPPPA | | |
| | | SKPLRPTTKIFSSKSTSRIAGLSKSLETSSALSPS | | |
| | | LKNKSKGIQSILKVPQPVPLIAQKPVGEMKNSC | | |
| | | NVLHPQSPNNSNRQGCKVPFGESKYFPSSSPVN | | |
| | | ILLSSQSVSDTFVKEVLKWKYEMFLNFGQCGP | | |
| | | PASLCQSISRPVPVRFHNYGDYFNVFFPLMVLN | | |
| | | TFETVAQEWLNSPNRENFYQLQVRKFPADYIK | | |
| | | YWEFAVYLEECELAKQLYPKENDLVFLAPERI | | |
| | | NEEKKDTERNDIQDLHEYHSGYVHKFRRTSV | | |
| | | MRNGKTECYLSIQTQENFPANLNELVNCIVISS | | |
| | | LVTTQRKLKAMSLLGSRNQLARAVLNPNPMD | | |
| | | FCTKDLLTTTSERIIAYLRDFNEDQKKAIETAY | | |
| | | AMVKHSPSVAKICLIHGPPGTGKSKTIVGLLYR | | |
| | | LLTENQRKGHSDENSNAKIKQNRVLVCAPSNA | | |
| | | AVDELMKKIILEFKEKCKDKKNPLGNCGDINL | | |
| | | VRLGPEKSINSEVLKFSLDSQVNHRMKKELPSH | | |
| | | VQAMHKRKEFLDYQLDELSRQRALCRGGREI | | |
| | | QRQELDENISKVSKERQELASKIKEVQGRPQKT | | |
| | | QSIIILESHIICCTLSTSGGLLLESAFRGQGGVPFS | | |
| | | CVIVDEAGQSCEIETLTPLIHRCNKLILVGDPKQ | | |
| | | LPPTVISMKAQEYGYDQSMMARFCRLLEENVE | | |
| | | HNMISRLPILQLTVQYRMHPDICLFPSNYVYNR | | |
| | | NLKTNRQTEAIRCSSDWPFQPYLVFDVGDGSE | | |
| | | RRDNDSYINVQEIKLVMEIIKLIKDKRKDVSFR | | |
| | | NIGIITHYKAQKTMIQKDLDKEFDRKGPAEVDT | | |
| | | VDAFQGRQKDCVIVTCVRANSIQGSIGFLASLQ | | |
| | | RLNVTITRAKYSLFILGHLRTLMENQHWNQLI | | |
| | | QDAQKRGAIIKTCDKNYRHDAVKILKLKPVLQ | | |
| | | RSLTHPPTIAPEGSRPQGGLPSSKLDSGFAKTSV | | |
| | | AASLYHTPSDSKEITLTVTSKDPERPPVHDQLQ | | |
| | | DPRLLKRMGIEVKGGIFLWDPQPSSPQHPGATP | | |
| | | PTGEPGFPVVHQDLSHIQQPAAVVAALSSHKPP | | |
| | | VRGEPPAASPEASTCQSKCDDPEEELCHRREAR | | |
| | | AFSEGEQEKCGSETHHTRRNSRWDKRTLEQED | | |
| | | SSSKKRKLL | | |
| FMR | Q06787 | MEELVVEVRGSNGAFYKAFVKDVHEDSITVAF | Fragile X | 136 |
| 1 | | ENNWQPDRQIPFHDVRFPPPVGYNKDINESDE | Syndrome | |
| | | VEVYSRANEKEPCCWWLAKVRMIKGEFYVIE | | |
| | | YAACDATYNEIVTIERLRSVNPNKPATKDTFH | | |
| | | KIKLDVPEDLRQMCAKEAAHKDFKKAVGAFS | | |
| | | VTYDPENYQLVILSINEVTSKRAHMLIDMHFRS | | |
| | | LRTKLSLIMRNEEASKQLESSRQLASRFHEQFI | | |
| | | VREDLMGLAIGTHGANIQQARKVPGVTAIDLD | | |
| | | EDTCTFHIYGEDQDAVKKARSFLEFAEDVIQVP | | |
| | | RNLVGKVIGKNGKLIQEIVDKSGVVRVRIEAEN | | |
| | | EKNVPQEEEIMPPNSLPSNNSRVGPNAPEEKKH | | |
| | | LDIKENSTHFSQPNSTKVQRVLVASSVVAGESQ | | |
| | | KPELKAWQGMVPFVFVGTKDSIANATVLLDY | | |
| | | HLNYLKEVDQLRLERLQIDEQLRQIGASSRPPP | | |
| | | NRTDKEKSYVTDDGQGMGRGSRPYRNRGHGR | | |
| | | RGPGYTSGTNSEASNASETESDHRDELSDWSL | | |
| | | APTEEERESFLRRGDGRRRGGGGRGQGGRGR | | |
| | | GGGFKGNDDHSRTDNRPRNPREAKGRTTDGS | | |
| | | LQIRVDCNNERSVHTKTLQNTSSEGSRLRTGK | | |
| | | DRNQKKEKPDSVDGQQPLVNGVP | | |
| SLC6 | P48029 | MAKKSAENGIYSVSGDEKKGPLIAPGPDGAPA | Cerebral | 137 |
| A8 | | KGDGPVGLGTPGGRLAVPPRETWTRQMDFIM | Creatine | |
| | | SCVGFAVGLGNVWRFPYLCYKNGGGVFLIPY | Deficiency | |
| | | VLIALVGGIPIFFLEISLGQFMKAGSINVWNICP | Syndrome 1 | |
| | | LFKGLGYASMVIVFYCNTYYIMVLAWGFYYL | | |
| | | VKSFTTTLPWATCGHTWNTPDCVEIFRHEDCA | | |
| | | NASLANLTCDQLADRRSPVIEFWENKVLRLSG | | |
| | | GLEVPGALNWEVTLCLLACWVLVYFCVWKG | | |
| | | VKSTGKIVYFTATFPYVVLVVLLVRGVLLPGA | | |
| | | LDGIIYYLKPDWSKLGSPQVWIDAGTQIFFSYA | | |
| | | IGLGALTALGSYNRFNNNCYKDAIILALINSGT | | |
| | | SFFAGFVVFSILGFMAAEQGVHISKVAESGPGL | | |
| | | AFIAYPRAVTLMPVAPLWAALFFFMLLLLGLD | | |
| | | SQFVGVEGFITGLLDLLPASYYFRFQREISVALC | | |
| | | CALCFVIDLSMVTDGGMYVFQLFDYYSASGTT | | |
| | | LLWQAFWECVVVAWVYGADRFMDDIACMIG | | |
| | | YRPCPWMKWCWSFFTPLVCMGIFIFNVVYYEP | | |
| | | LVYNNTYVYPWWGEAMGWAFALSSMLCVPL | | |
| | | HLLGCLLRAKGTMAERWQHLTQPIWGLHHLE | | |
| | | YRAQDADVRGLTTLTPVSESSKVVVVESVM | | |
| UBE3 | Q05086 | MEKLHQCYWKSGEPQSDDIEASRMKRAAAKH | Angelman | 138 |
| A | | LIERYYHQLTEGCGNEACTNEFCASCPTFLRM | Syndrome | |
| | | DNNAAAIKALELYKINAKLCDPHPSKKGASSA | | |
| | | YLENSKGAPNNSCSEIKMNKKGARIDFKDVTY | | |
| | | LTEEKVYEILELCREREDYSPLIRVIGRVFSSAE | | |
| | | ALVQSFRKVKQHTKEELKSLQAKDEDKDEDE | | |
| | | KEKAACSAAAMEEDSEASSSRIGDSSQGDNNL | | |
| | | QKLGPDDVSVDIDAIRRVYTRLLSNEKIETAFL | | |
| | | NALVYLSPNVECDLTYHNVYSRDPNYLNLFIIV | | |
| | | MENRNLHSPEYLEMALPLFCKAMSKLPLAAQ | | |
| | | GKLIRLWSKYNADQIRRMMETFQQLITYKVIS | | |
| | | NEFNSRNLVNDDDAIVAASKCLKMVYYANVV | | |
| | | GGEVDTNHNEEDDEEPIPESSELTLQELLGEER | | |
| | | RNKKGPRVDPLETELGVKTLDCRKPLIPFEEFI | | |
| | | NEPLNEVLEMDKDYTFFKVETENKFSFMTCPFI | | |
| | | LNAVTKNLGLYYDNRIRMYSERRITVLYSLVQ | | |
| | | GQQLNPYLRLKVRRDHIIDDALVRLEMIAMEN | | |
| | | PADLKKQLYVEFEGEQGVDEGGVSKEFFQLVV | | |
| | | EEIFNPDIGMFTYDESTKLFWFNPSSFETEGQFT | | |
| | | LIGIVLGLAIYNNCILDVHFPMVVYRKLMGKK | | |
| | | GTFRDLGDSHPVLYQSLKDLLEYEGNVEDDM | | |
| | | MITFQISQTDLFGNPMMYDLKENGDKIPITNEN | | |
| | | RKEFVNLYSDYILNKSVEKQFKAFRRGFHMVT | | |
| | | NESPLKYLFRPEEIELLICGSRNLDFQALEETTE | | |
| | | YDGGYTRDSVLIREFWEIVHSFTDEQKRLFLQF | | |
| | | TTGTDRAPVGGLGKLKMIIAKNGPDTERLPTS | | |
| | | HTCFNVLLLPEYSSKEKLKERLLKAITYAKGFG | | |
| | | ML | | |
| SOD1 | P00441 | MATKAVCVLKGDGPVQGIINFEQKESNGPVKV | Amyotrophic | 139 |
| | | WGSIKGLTEGLHGFHVHEFGDNTAGCTSAGPH | Lateral | |
| | | FNPLSRKHGGPKDEERHVGDLGNVTADKDGV | Sclerosis | |
| | | ADVSIEDSVISLSGDHCIIGRTLVVHEKADDLG | | |
| | | KGGNEESTKTGNAGSRLACGVIGIAQ | | |
| TDP4 | Q13148 | MSEYIRVTEDENDEPIEIPSEDDGTVLLSTVTAQ | Amyotrophic | 140 |
| 3 | | FPGACGLRYRNPVSQCMRGVRLVEGILHAPDA | Lateral | |
| | | GWGNLVYVVNYPKDNKRKMDETDASSAVKV | Sclerosis | |
| | | KRAVQKTSDLIVLGLPWKTTEQDLKEYFSTFG | | |
| | | EVLMVQVKKDLKTGHSKGFGFVRFTEYETQV | | |
| | | KVMSQRHMIDGRWCDCKLPNSKQSQDEPLRS | | |
| | | RKVFVGRCTEDMTEDELREFFSQYGDVMDVFI | | |
| | | PKPFRAFAFVTFADDQIAQSLCGEDLIIKGISVH | | |
| | | ISNAEPKHNSNRQLERSGRFGGNPGGFGNQGG | | |
| | | FGNSRGGGAGLGNNQGSNMGGGMNFGAFSIN | | |
| | | PAMMAAAQAALQSSWGMMGMLASQQNQSG | | |
| | | PSGNNQNQGNMQREPNQAFGSGNNSYSGSNS | | |
| | | GAAIGWGSASNAGSGSGFNGGFGSSMDSKSSG | | |
| | | WGM | | |
| C9orf | Q96LT7 | MSTLCPPPSPAVAKTEIALSGKSPLLAATFAYW | Amyotrophic | 141 |
| 72 | | DNILGPRVRHIWAPKTEQVLLSDGEITFLANHT | Lateral | |
| | | LNGEILRNAESGAIDVKFFVLSEKGVIIVSLIFD | Sclerosis | |
| | | GNWNGDRSTYGLSIILPQTELSFYLPLHRVCVD | | |
| | | RLTHIIRKGRIWMHKERQENVQKIILEGTERME | | |
| | | DQGQSIIPMLTGEVIPVMELLSSMKSHSVPEEID | | |
| | | IADTVLNDDDIGDSCHEGFLLNAISSHLQTCGC | | |
| | | SVVVGSSAEKVNKIVRTLCLFLTPAERKCSRLC | | |
| | | EAESSFKYESGLFVQGLLKDSTGSFVLPFRQVM | | |
| | | YAPYPTTHIDVDVNTVKQMPPCHEHIYNQRRY | | |
| | | MRSELTAFWRATSEEDMAQDTIIYTDESFTPDL | | |
| | | NIFQDVLHRDTLVKAFLDQVFQLKPGLSLRSTF | | |
| | | LAQFLLVLHRKALTLIKYIEDDTQKGKKPFKSL | | |
| | | RNLKIDLDLTAEGDLNIIMALAEKIKPGLHSFIF | | |
| | | GRPFYTSVQERDVLMTF | | |
| FXN | Q16595 | MWTLGRRAVAGLLASPSPAQAQTLTRVPRPAE | Friedreich's | 142 |
| | | LAPLCGRRGLRTDIDATCTPRRASSNQRGLNQI | Ataxia | |
| | | WNVKKQSVYLMNLRKSGTLGHPGSLDETTYE | | |
| | | RLAEETLDSLAEFFEDLADKPYTFEDYDVSFGS | | |
| | | GVLTVKLGGDLGTYVINKQTPNKQIWLSSPSS | | |
| | | GPKRYDWTGKNWVYSHDGVSLHELLAAELTK | | |
| | | ALKTKLDLSSLAYSGKDA | | |
| MEC | P51608 | MVAGMLGLREEKSEDQDLQGLKDKPLKFKKV | Rett Syndrome | 143 |
| P2 | | KKDKKEEKEGKHEPVQPSAHHSAEPAEAGKA | | |
| | | ETSEGSGSAPAVPEASASPKQRRSIIRDRGPMY | | |
| | | DDPTLPEGWTRKLKQRKSGRSAGKYDVYLINP | | |
| | | QGKAFRSKVELIAYFEKVGDTSLDPNDFDFTV | | |
| | | TGRGSPSRREQKPPKKPKSPKAPGTGRGRGRP | | |
| | | KGSGTTRPKAATSEGVQVKRVLEKSPGKLLVK | | |
| | | MPFQTSPGGKAEGGGATTSTQVMVIKRPGRKR | | |
| | | KAEADPQAIPKKRGRKPGSVVAAAAAEAKKK | | |
| | | AVKESSIRSVQETVLPIKKRKTRETVSIEVKEVV | | |
| | | KPLLVSTLGEKSGKGLKTCKSPGRKSKESSPKG | | |
| | | RSSSASSPPKKEHHHHHHHSESPKAPVPLLPPL | | |
| | | PPPPPEPESSEDPTSPPEPQDLSSSVCKEEKMPR | | |
| | | GGSLESDGCPKEPAKTQPAVATAATAAEKYK | | |
| | | HRGEGERKDIVSSSMPRPNREEPVDSRTPVTER | | |
| | | VS | | |
| ASPA | P45381 | MTSCHIAEEHIQKVAIFGGTHGNELTGVFLVKH | Canavan | 144 |
| | | WLENGAEIQRTGLEVKPFITNPRAVKKCTRYID | Disease | |
| | | CDLNRIFDLENLGKKMSEDLPYEVRRAQEINH | | |
| | | LFGPKDSEDSYDIIFDLHNTTSNMGCTLILEDSR | | |
| | | NNFLIQMFHYIKTSLAPLPCYVYLIEHPSLKYA | | |
| | | TTRSIAKYPVGIEVGPQPQGVLRADILDQMRK | | |
| | | MIKHALDFIHHFNEGKEFPPCAIEVYKIIEKVDY | | |
| | | PRDENGEIAAIIHPNLQDQDWKPLHPGDPMFLT | | |
| | | LDGKTIPLGGDCTVYPVFVNEAAYYEKKEAFA | | |
| | | KTTKLTLNAKSIRCCLH | | |
| ALD | P49419 | MWRLPRALCVHAAKTSKLSGPWSRPAAFMST | Pyridoxine- | 145 |
| H7A1 | | LLINQPQYAWLKELGLREENEGVYNGSWGGR | Dependent | |
| | | GEVITTYCPANNEPIARVRQASVADYEETVKK | Epilepsy | |
| | | AREAWKIWADIPAPKRGEIVRQIGDALREKIQV | | |
| | | LGSLVSLEMGKILVEGVGEVQEYVDICDYAVG | | |
| | | LSRMIGGPILPSERSGHALIEQWNPVGLVGIITA | | |
| | | FNFPVAVYGWNNAIAMICGNVCLWKGAPTTS | | |
| | | LISVAVTKIIAKVLEDNKLPGAICSLTCGGADIG | | |
| | | TAMAKDERVNLLSFTGSTQVGKQVGLMVQER | | |
| | | FGRSLLELGGNNAIIAFEDADLSLVVPSALFAA | | |
| | | VGTAGQRCTTARRLFIHESIHDEVVNRLKKAY | | |
| | | AQIRVGNPWDPNVLYGPLHTKQAVSMFLGAV | | |
| | | EEAKKEGGTVVYGGKVMDRPGNYVEPTIVTG | | |
| | | LGHDASIAHTETFAPILYVFKFKNEEEVFAWNN | | |
| | | EVKQGLSSSIFTKDLGRIFRWLGPKGSDCGIVN | | |
| | | VNIPTSGAEIGGAFGGEKHTGGGRESGSDAWK | | |
| | | QYMRRSTCTINYSKDLPLAQGIKFQ | | |

[0690] In some embodiments, the target cell is a cell in the cerebellum, e.g., for the treatment of Spinocerebellar Ataxia, Autosomal Recessive, Type 1, e.g., when the exogenous agent is SYNE1. In some embodiments, the target cell is a cell in the brain, spinal cord, and/or muscles, e.g., for the treatment of Ataxia with Oculomotor Apraxia, Type 2, e.g., when the exogenous agent is SETX. In some embodiments, the target cell is a neuron or an astrocyte, e.g., for the treatment of Fragile X Syndrome, e.g., when the exogenous agent is FMR1. In some embodiments, the target cell is a motor neuron, e.g., for the treatment of Amyotrophic Lateral Sclerosis, e.g., when the exogenous agent is SOD1, TDP43, or C9orf72. In some embodiments, the target cell is a cell in the nervous system, heart, liver, and/or skeletal muscle, e.g., for the treatment of Friedreich's Ataxia, e.g., when the exogenous agent is FXN. In some embodiments, the target cell is a neuron in the brain, e.g., for the treatment of Rett Syndrome, e.g., when the exogenous agent is MECP2. In some embodiments, the target cell is an oligodendrocyte or a neuron, e.g., for the treatment of Canavan Disease, e.g., when the exogenous agent is ASPA.

[0691] In some embodiments, the exogenous agent comprises a protein of Table 6 below. In some embodiments, the exogenous agent comprises the wild-type human sequence of any of the proteins of Table 6, a functional fragment thereof (e.g., an enzymatically active fragment thereof), or a functional variant thereof. In some embodiments, the exogenous agent comprises an amino acid sequence having at least 70%, 75%, 80%, 85%, 90%, 95%, 96%, 97%, 98%, or 99%, identity to an amino acid sequence of Table 6, e.g., a Uniprot Protein Accession Number sequence of column 2 of Table 6 or an amino acid sequence of column 3 of Table 6. In some embodiments, the payload gene encodes an amino acid sequence having at least 70%, 75%, 80%, 85%, 90%, 95%, 96%, 97%, 98%, or 99%, identity to an amino acid sequence of Table 6.

TABLE 6
Lysosomal storage diseases or disorders and/or CNS diseases or disorders.
The first column lists exogenous agents that can be delivered to treat
the indications in the fourth column, according to the methods and uses
herein. Each Uniprot accession number of Table 6 is herein incorporated
by reference in its entirety.

| | Uniprot | | | |
|---|---|---|---|---|
| | Protein(s) | | | SEQ |
| | Accession | Amino Acid Sequence (first | Disease/ | ID |
| Gene | Number | Uniprot Accession Number) | Disorder | NO |
| TPP1 | O14773 | MGLQACLLGLFALILSGKCSYSPEPDQRRTLP | Batten Disease | 146 |
| | | PGWVSLGRADPEEELSLTFALRQQNVERLSEL | (CLN2) | |
| | | VQAVSDPSSPQYGKYLTLENVADLVRPSPLTL | | |
| | | HTVQKWLLAAGAQKCHSVITQDFLTCWLSIR | | |
| | | QAELLLPGAEFHHYVGGPTETHVVRSPHPYQ | | |
| | | LPQALAPHVDFVGGLHRFPPTSSLRQRPEPQV | | |
| | | TGTVGLHLGVTPSVIRKRYNLTSQDVGSGTS | | |
| | | NNSQACAQFLEQYFHDSDLAQFMRLFGGNFA | | |
| | | HQASVARVVGQQGRGRAGIEASLDVQYLMS | | |
| | | AGANISTWVYSSPGRHEGQEPFLQWLMLLSN | | |
| | | ESALPHVHTVSYGDDEDSLSSAYIQRVNTEL | | |
| | | MKAAARGLTLLFASGDSGAGCWSVSGRHQF | | |
| | | RPTFPASSPYVTTVGGTSFQEPFLITNEIVDYIS | | |
| | | GGGFSNVFPRPSYQEEAVTKFLSSSPHLPPSSY | | |
| | | FNASGRAYPDVAALSDGYWVVSNRVPIPWV | | |
| | | SGTSASTPVFGGILSLINEHRILSGRPPLGFLNP | | |
| | | RLYQQHGAGLFDVTRGCHESCLDEEVEGQGF | | |
| | | CSGPGWDPVTGWGTPNFPALLKTLLNP | | |
| FUC | P04066 | MRAPGMRSRPAGPALLLLLLFLGAAESVRRA | Fucosidosis | 147 |
| A1 | | QPPRRYTPDWPSLDSRPLPAWFDEAKFGVFIH | | |
| | | WGVFSVPAWGSEWFWWHWQGEGRPQYQRF | | |
| | | MRDNYPPGFSYADFGPQFTARFFHPEEWADL | | |
| | | FQAAGAKYVVLTTKHHEGFTNWPSPVSWNW | | |
| | | NSKDVGPHRDLVGELGTALRKRNIRYGLYHS | | |
| | | LLEWFHPLYLLDKKNGFKTQHFVSAKTMPEL | | |
| | | YDLVNSYKPDLIWSDGEWECPDTYWNSTNFL | | |
| | | SWLYNDSPVKDEVVVNDRWGQNCSCHHGG | | |
| | | YYNCEDKFKPQSLPDHKWEMCTSIDKFSWG | | |
| | | YRRDMALSDVTEESEIISELVQTVSLGGNYLL | | |
| | | NIGPTKDGLIVPIFQERLLAVGKWLSINGEAIY | | |
| | | ASKPWRVQWEKNTTSVWYTSKGSAVYAIFL | | |
| | | HWPENGVLNLESPITTSTTKITMLGIQGDLKW | | |
| | | STDPDKGLFISLPQLPPSAVPAEFAWTIKLTGV | | |
| | | K | | |
| GAL | P54803 | MAEWLLSASWQRRAKAMTAAAGSAGRAAV | Krabbe Disease | 148 |
| C | | PLLLCALLAPGGAYVLDDSDGLGREFDGIGA | | |
| | | VSGGGATSRLLVNYPEPYRSQILDYLFKPNFG | | |
| | | ASLHILKVEIGGDGQTTDGTEPSHMHYALDE | | |
| | | NYFRGYEWWLMKEAKKRNPNITLIGLPWSFP | | |
| | | GWLGKGFDWPYVNLQLTAYYVVTWIVGAK | | |
| | | RYHDLDIDYIGIWNERSYNANYIKILRKMLNY | | |
| | | QGLQRVKIIASDNLWESISASMLLDAELFKVV | | |
| | | DVIGAHYPGTHSAKDAKLTGKKLWSSEDFST | | |
| | | LNSDMGAGCWGRILNQNYINGYMTSTIAWN | | |
| | | LVASYYEQLPYGRCGLMTAQEPWSGHYVVE | | |
| | | SPVWVSAHTTQFTQPGWYYLKTVGHLEKGG | | |
| | | SYVALTDGLGNLTIIIETMSHKHSKCIRPFLPY | | |
| | | FNVSQQFATFVLKGSFSEIPELQVWYTKLGKT | | |
| | | SERFLFKQLDSLWLLDSDGSFTLSLHEDELFT | | |
| | | LTTLTTGRKGSYPLPPKSQPFPSTYKDDFNVD | | |
| | | YPFFSEAPNFADQTGVFEYFTNIEDPGEHHFT | | |
| | | LRQVLNQRPITWAADASNTISIIGDYNWTNLT | | |
| | | IKCDVYIETPDTGGVFIAGRVNKGGILIRSARG | | |
| | | IFFWIFANGSYRVTGDLAGWIIYALGRVEVTA | | |
| | | KKWYTLTLTIKGHFTSGMLNDKSLWTDIPVN | | |
| | | FPKNGWAAIGTHSFEFAQFDNFLVEATR | | |
| HEX | P06865 | MTSSRLWFSLLLAAAFAGRATALWPWPQNF | Tay Sachs Disease | 149 |
| A | | QTSDQRYVLYPNNFQFQYDVSSAAQPGCSVL | | |
| | | DEAFQRYRDLLFGSGSWPRPYLTGKRHTLEK | | |
| | | NVLVVSVVTPGCNQLPTLESVENYTLTINDD | | |
| | | QCLLLSETVWGALRGLETFSQLVWKSAEGTF | | |
| | | FINKTEIEDFPRFPHRGLLLDTSRHYLPLSSILD | | |
| | | TLDVMAYNKLNVFHWHLVDDPSFPYESFTFP | | |
| | | ELMRKGSYNPVTHIYTAQDVKEVIEYARLRGI | | |
| | | RVLAEFDTPGHTLSWGPGIPGLLTPCYSGSEP | | |
| | | SGTFGPVNPSLNNTYEFMSTFFLEVSSVFPDF | | |
| | | YLHLGGDEVDFTCWKSNPEIQDFMRKKGFGE | | |
| | | DFKQLESFYIQTLLDIVSSYGKGYVVWQEVF | | |
| | | DNKVKIQPDTIIQVWREDIPVNYMKELELVTK | | |
| | | AGFRALLSAPWYLNRISYGPDWKDFYIVEPL | | |
| | | AFEGTPEQKALVIGGEACMWGEYVDNTNLV | | |
| | | PRLWPRAGAVAERLWSNKLTSDLTFAYERLS | | |
| | | HFRCELLRRGVQAQPLNVGFCEQEFEQT | | |
| HEX | P07686 | MELCGLGLPRPPMLLALLLATLLAAMLALLT | Sandhoff Disease | 150 |
| B | | QVALVVQVAEAARAPSVSAKPGPALWPLPLS | | |
| | | VKMTPNLLHLAPENFYISHSPNSTAGPSCTLL | | |
| | | EEAFRRYHGYIFGFYKWHHEPAEFQAKTQVQ | | |
| | | QLLVSITLQSECDAFPNISSDESYTLLVKEPVA | | |
| | | VLKANRVWGALRGLETFSQLVYQDSYGTFTI | | |
| | | NESTIIDSPRFSHRGILIDTSRHYLPVKIILKTLD | | |
| | | AMAFNKFNVLHWHIVDDQSFPYQSITFPELSN | | |
| | | KGSYSLSHVYTPNDVRMVIEYARLRGIRVLPE | | |
| | | FDTPGHTLSWGKGQKDLLTPCYSRQNKLDSF | | |
| | | GPINPTLNTTYSFLTTFFKEISEVFPDQFIHLGG | | |
| | | DEVEFKCWESNPKIQDFMRQKGFGTDFKKLE | | |
| | | SFYIQKVLDIIATINKGSIVWQEVFDDKAKLAP | | |
| | | GTIVEVWKDSAYPEELSRVTASGFPVILSAPW | | |
| | | YLDLISYGQDWRKYYKVEPLDFGGTQKQKQ | | |
| | | LFIGGEACLWGEYVDATNLTPRLWPRASAVG | | |
| | | ERLWSSKDVRDMDDAYDRLTRHRCRMVER | | |
| | | GIAAQPLYAGYCNHENM | | |
| MAN | O00462 | MRLHLLLLLALCGAGTTAAELSYSLRGNWSI | Beta-mannosidosis | 151 |
| BA | | CNGNGSLELPGAVPGCVHSALFQQGLIQDSY | | |
| | | YRFNDLNYRWVSLDNWTYSKEFKIPFEISKW | | |
| | | QKVNLILEGVDTVSKILFNEVTIGETDNMFNR | | |
| | | YSFDITNVVRDVNSIELRFQSAVLYAAQQSKA | | |
| | | HTRYQVPPDCPPLVQKGECHVNFVRKEQCSF | | |
| | | SWDWGPSFPTQGIWKDVRIEAYNICHLNYFT | | |
| | | FSPIYDKSAQEWNLEIESTFDVVSSKPVGGQVI | | |
| | | VAIPKLQTQQTYSIELQPGKRIVELFVNISKNIT | | |
| | | VETWWPHGHGNQTGYNMTVLFELDGGLNIE | | |
| | | KSAKVYFRTVELIEEPIKGSPGLSFYFKINGFPI | | |
| | | FLKGSNWIPADSFQDRVTSELLRLLLQSVVDA | | |
| | | NMNTLRVWGGGIYEQDEFYELCDELGIMVW | | |
| | | QDFMFACALYPTDQGFLDSVTAEVAYQIKRL | | |
| | | KSHPSIIIWSGNNENEEALMMNWYHISFTDRP | | |
| | | IYIKDYVTLYVKNIRELVLAGDKSRPFITSSPT | | |
| | | NGAETVAEAWVSQNPNSNYFGDVHFYDYIS | | |
| | | DCWNWKVFPKARFASEYGYQSWPSFSTLEK | | |
| | | VSSTEDWSFNSKFSLHRQHHEGGNKQMLYQ | | |
| | | AGLHFKLPQSTDPLRTFKDTIYLTQVMQAQC | | |
| | | VKTETEFYRRSRSEIVDQQGHTMGALYWQLN | | |
| | | DIWQAPSWASLEYGGKWKMLHYFAQNFFAP | | |
| | | LLPVGFENENTFYIYGVSDLHSDYSMTLSVRV | | |
| | | HTWSSLEPVCSRVTERFVMKGGEAVCLYEEP | | |
| | | VSELLRRCGNCTRESCVVSFYLSADHELLSPT | | |
| | | NYHFLSSPKEAVGLCKAQITAIISQQGDIFVFD | | |
| | | LETSAVAPFVWLDVGSIPGRFSDNGFLMTEKT | | |
| | | RTILFYPWEPTSKNELEQSFHVTSLTDIY | | |
| ARS | P15289 | MGAPRSLLLALAAGLAVARPPNIVLIFADDLG | Metachromatic | 152 |
| A | | YGDLGCYGHPSSTTPNLDQLAAGGLRFTDFY | Leukodystrophy | |
| | | VPVSLCTPSRAALLTGRLPVRMGMYPGVLVP | | |
| | | SSRGGLPLEEVTVAEVLAARGYLTGMAGKW | | |
| | | HLGVGPEGAFLPPHQGFHRFLGIPYSHDQGPC | | |
| | | QNLTCFPPATPCDGGCDQGLVPIPLLANLSVE | | |
| | | AQPPWLPGLEARYMAFAHDLMADAQRQDRP | | |
| | | FFLYYASHHTHYPQFSGQSFAERSGRGPFGDS | | |
| | | LMELDAAVGTLMTAIGDLGLLEETLVIFTAD | | |
| | | NGPETMRMSRGGCSGLLRCGKGTTYEGGVR | | |
| | | EPALAFWPGHIAPGVTHELASSLDLLPTLAAL | | |
| | | AGAPLPNVTLDGFDLSPLLLGTGKSPRQSLFF | | |
| | | YPSYPDEVRGVFAVRTGKYKAHFFTQGSAHS | | |
| | | DTTADPACHASSSLTAHEPPLLYDLSKDPGEN | | |
| | | YNLLGGVAGATPEVLQALKQLQLLKAQLDA | | |
| | | AVTFGPSQVARGEDPALQICCHPGCTPRPACC | | |
| | | HCPDPHA | | |
| GNP | Q3T906 | MLFKLLQRQTYTCLSHRYGLYVCFLGVVVTI | Mucolipidosis | 153 |
| TAB | | VSAFQFGEVVLEWSRDQYHVLFDSYRDNIAG | Type IIIa; | |
| | | KSFQNRLCLPMPIDVVYTWVNGTDLELLKEL | Mucolipidosis | |
| | | QQVREQMEEEQKAMREILGKNTTEPTKKSEK | Type IIIb | |
| | | QLECLLTHCIKVPMLVLDPALPANITLKDLPS | | |
| | | LYPSFHSASDIFNVAKPKNPSTNVSVVVFDST | | |
| | | KDVEDAHSGLLKGNSRQTVWRGYLTTDKEV | | |
| | | PGLVLMQDLAFLSGFPPTFKETNQLKTKLPEN | | |
| | | LSSKVKLLQLYSEASVALLKLNNPKDFQELN | | |
| | | KQTKKNMTIDGKELTISPAYLLWDLSAISQSK | | |
| | | QDEDISASRFEDNEELRYSLRSIERHAPWVRNI | | |
| | | FIVTNGQIPSWLNLDNPRVTIVTHQDVFRNLS | | |
| | | HLPTFSSPAIESHIHRIEGLSQKFIYLNDDVMF | | |
| | | GKDVWPDDFYSHSKGQKVYLTWPVPNCAEG | | |
| | | CPGSWIKDGYCDKACNNSACDWDGGDCSGN | | |
| | | SGGSRYIAGGGGTGSIGVGQPWQFGGGINSVS | | |
| | | YCNQGCANSWLADKFCDQACNVLSCGFDAG | | |
| | | DCGQDHFHELYKVILLPNQTHYIIPKGECLPY | | |
| | | FSFAEVAKRGVEGAYSDNPIIRHASIANKWKT | | |
| | | IHLIMHSGMNATTIHFNLTFQNTNDEEFKMQI | | |
| | | TVEVDTREGPKLNSTAQKGYENLVSPITLLPE | | |
| | | AEILFEDIPKEKRFPKFKRHDVNSTRRAQEEV | | |
| | | KIPLVNISLLPKDAQLSLNTLDLQLEHGDITLK | | |
| | | GYNLSKSALLRSFLMNSQHAKIKNQAIITDET | | |
| | | NDSLVAPQEKQVHKSILPNSLGVSERLQRLTF | | |
| | | PAVSVKVNGHDQGQNPPLDLETTARFRVETH | | |
| | | TQKTIGGNVTKEKPPSLIVPLESQMTKEKKIT | | |
| | | GKEKENSRMEENAENHIGVTEVLLGRKLQHY | | |
| | | TDSYLGFLPWEKKKYFQDLLDEEESLKTQLA | | |
| | | YFTDSKNTGRQLKDTFADSLRYVNKILNSKF | | |
| | | GFTSRKVPAHMPHMIDRIVMQELQDMFPEEF | | |
| | | DKTSFHKVRHSEDMQFAFSYFYYLMSAVQPL | | |
| | | NISQVFDEVDTDQSGVLSDREIRTLATRIHELP | | |
| | | LSLQDLTGLEHMLINCSKMLPADITQLNNIPP | | |
| | | TQESYYDPNLPPVTKSLVTNCKPVTDKIHKA | | |
| | | YKDKNKYRFEIMGEEEIAFKMIRTNVSHVVG | | |
| | | QLDDIRKNPRKFVCLNDNIDHNHKDAQTVKA | | |
| | | VLRDFYESMFPIPSQFELPREYRNRFLHMHEL | | |
| | | QEWRAYRDKLKFWTHCVLATLIMFTIFSFFA | | |
| | | EQLIALKRKIFPRRRIHKEASPNRIRV | | |
| MCO | Q9GZU1 | MTAPAGPRGSETERLLTPNPGYGTQAGPSPAP | Mucolipidosis | 154 |
| LN1 | | PTPPEEEDLRRRLKYFFMSPCDKFRAKGRKPC | Type IV | |
| | | KLMLQVVKILVVTVQLILFGLSNQLAVTFREE | | |
| | | NTIAFRHLFLLGYSDGADDTFAAYTREQLYQ | | |
| | | AIFHAVDQYLALPDVSLGRYAYVRGGGDPW | | |
| | | TNGSGLALCQRYYHRGHVDPANDTFDIDPM | | |
| | | VVTDCIQVDPPERPPPPPSDDLTLLESSSSYKN | | |
| | | LTLKFHKLVNVTIHFRLKTINLQSLINNEIPDC | | |
| | | YTFSVLITFDNKAHSGRIPISLETQAHIQECKH | | |
| | | PSVFQHGDNSFRLLFDVVVILTCSLSFLLCARS | | |
| | | LLRGFLLQNEFVGFMWRQRGRVISLWERLEF | | |
| | | VNGWYILLVTSDVLTISGTIMKIGIEAKNLAS | | |
| | | YDVCSILLGTSTLLVWVGVIRYLTFFHNYNILI | | |
| | | ATLRVALPSVMRFCCCVAVIYLGYCFCGWIV | | |
| | | LGPYHVKFRSLSMVSECLFSLINGDDMFVTFA | | |
| | | AMQAQQGRSSLVWLFSQLYLYSFISLFIYMVL | | |
| | | SLFIALITGAYDTIKHPGGAGAEESELQAYIAQ | | |
| | | CQDSPTSGKFRRGSGSACSLLCCCGRDPSEEH | | |
| | | SLLVN | | |

[0692] In some embodiments, the target cell is an oligodendrocyte, e.g., for the treatment of Krabbe Disease, e.g., when the exogenous agent is GALC. In some embodiments, the target cell is a neuron, e.g., for the treatment of Tay Sachs Disease, e.g., when the exogenous agent is HEXA. In some embodiments, the target cell is a neuron, e.g., for the treatment of Sandhoff Disease, e.g., when the exogenous agent is HEXB.

[0693] In some embodiments, the protein agent is other than a clotting factor, e.g., other than Factor VII or Factor IX. In some embodiments, the protein agent is other than a reporter protein, e.g., fluorescent protein, e.g., GFP or luciferase. In some the protein agent is other than a cell surface receptor, an NGF receptor, galactocerebrosidase, gp91 phox, IFN-alpha, TK, GCV, and autoimmune antigen, cytokine, angiogenesis inhibitor, or anti-cancer agent, or a fragment or variant thereof.

### VII. Insulator Elements

[0694] In some embodiments, a fusosome, retroviral or lentiviral vector, or VLP further comprises one or more insulator elements, e.g., an insulator element described herein. Insulators elements may contribute to protecting lentivirus-expressed sequences, e.g., therapeutic polypeptides, from integration site effects, which may be mediated by cis-acting elements present in genomic DNA and lead to deregulated expression of transferred sequences (e.g., position effect; see, e.g., Burgess-Beusse et al, 2002, Proc. Natl. Acad. Sci., USA, 99: 16433; and Zhan et al, 2001, Hum. Genet., 109:471) or deregulated expression of endogenous sequences adjacent to the transferred sequences. In some embodiments, transfer vectors comprise one or more insulator element the 3′ LTR and upon integration of the provirus into the host genome, the provirus comprises the one or more insulators at the 5′ LTR and/or 3′ LTR, by virtue of duplicating the 3′ LTR. Suitable insulators include, but are not limited to, the chicken β-globin insulator (see Chung et al, 1993. Cell 74:505; Chung et al, 1997. N4S 94:575; and Bell et al., 1999. Cell 98:387, incorporated by reference herein) or an insulator from a human β-globin locus, such as chicken HS4. In some embodiments the insulator binds CCCTC binding factor (CTCF). In some embodiments the insulator is a barrier insulator. In some embodiments the insulator is an enhancer-blocking insulator. See, e.g., Emery et al., Human Gene Therapy, 2011, and in Browning and Trobridge, Biomedicines, 2016, both of which are included in their entirety by reference.

[0695] In some embodiments, insulators in the retroviral nucleic acid reduce genotoxicity in recipient cells. Genotoxicity can be measured, e.g., as described in Cesana et al, “Uncovering and dissecting the genotoxicity of self-inactivating lentiviral vectors in vivo” Mol Ther. 2014 April; 22(4):774-85. doi: 10.1038/mt.2014.3. Epub 2014 Jan. 20.

### VIII. Assessing Fusosome Content of Target Cell

[0696] The present disclosure also provides, in some aspects, a method of assessing fusosome content of a target cell (e.g., fusosome fusion to a target cell) in a subject, comprising providing a biological sample from a subject that has received a fusosome composition (e.g., a fusosome composition described herein), and performing an assay to determine one or more properties of the biological sample resulting from fusion of a target cell in the biological sample with a fusosome as described herein. In some aspects, the disclosure provides a method of measuring fusion with a target cell, e.g., as described in Example 71. In some embodiments, determining one or more properties of the biological sample comprises determining: the presence of a fusogen, the level of a cargo or payload, or an activity relating to a cargo or payload.

[0697] In some aspects, the present disclosure provides a method of assessing fusosome content of a target cell (e.g., fusosome fusion to a target cell) in a subject, comprising providing a biological sample from a subject that has received a fusosome composition, e.g., as described herein, and testing the biological sample for the presence of a fusogen, e.g., a fusogen described herein. In some instances, the level of the fusogen detected is greater (e.g., at least about 5%, 10%, 20%, 30%, 40%, 50%, 60%, 70%, 80%, 90%, 100%, 200%, 300%, 400%, 500%, 600%, 700%, 800%, 900%, 1000%, 2000%, 3000%, 4000%, 5000%, 10,000%, 50,000%, or 100,000% greater) than that observed in a corresponding biological sample from a subject that has not received a fusosome composition. In some embodiments, the subject is the same subject prior to administration of the fusosome composition, and in some embodiments, the subject is a different subject.

[0698] In some aspects, the present disclosure provides a method of assessing fusosome content of a target cell (e.g., fusosome fusion to a target cell) in a subject, comprising providing a biological sample from a subject that has received a fusosome composition, e.g., as described herein, and testing the biological sample for the presence of a cargo or payload, e.g., delivered by a fusosome as described herein. In some instances, the level of the cargo or payload detected is greater (e.g., at least about 5%, 10%, 20%, 30%, 40%, 50%, 60%, 70%, 80%, 90%, 100%, 200%, 300%, 400%, 500%, 600%, 700%, 800%, 900%, 1000%, 2000%, 3000%, 4000%, 5000%, 10,000%, 50,000%, or 100,000% greater) than that observed in a corresponding biological sample from a subject that has not received a fusosome composition. In some embodiments, the subject is the same subject prior to administration of the fusosome composition, and in some embodiments, the subject is a different subject.

[0699] In some aspects, the present disclosure provides a method of assessing fusosome content of a target cell (e.g., fusosome fusion to a target cell in a subject), comprising providing a biological sample from a subject that has received a fusosome composition, e.g., as described herein, and testing the biological sample for alteration of an activity relating to the fusosome composition, e.g., an activity relating to a cargo or payload delivered by the fusosome composition. In some instances, the level of the activity detected is increased, e.g., by at least about 5%, 10%, 20%, 30%, 40%, 50%, 60%, 70%, 80%, 90%, 100%, 200%, 300%, 400%, 500%, 600%, 700%, 800%, 900%, 1000%, 2000%, 3000%, 4000%, 5000%, 10,000%, 50,000%, or 100,000%, relative to that of a corresponding biological sample from a subject that has not received a fusosome composition (e.g., the same subject prior to administration of the fusosome composition). In some instances, the level of the activity detected is decreased, e.g., by at least about 5%, 10%, 20%, 30%, 40%, 50%, 60%, 70%, 80%, 90%, 100%, 200%, 300%, 400%, 500%, 600%, 700%, 800%, 900%, 1000%, 2000%, 3000%, 4000%, 5000%, 10,000%, 50,000%, or 100,000%, relative to that of a corresponding biological sample from a subject that has not received a fusosome composition. In some embodiments, the subject is the same subject prior to administration of the fusosome composition, and in some embodiments, the subject is a different subject.

[0700] In one aspect, the present disclosure provides a method of assessing fusosome fusion to a target cell in a subject, comprising providing a biological sample from a subject that has received a fusosome composition, e.g., as described herein, and assessing a level of unfused fusosomes in the biological sample.

[0701] In some embodiments of the methods of assessing fusosome content of a target cell (e.g., fusosome fusion to a target cell), resulting in formation of a recipient cell, in the subject, the method further comprises collecting the biological sample from the subject. In embodiments, the biological sample includes one or more recipient cells.

[0702] In some embodiments of the methods of assessing fusosome content of a target cell (e.g., fusosome fusion to a target cell) in the subject, the method further comprises separating recipient cells in the biological sample from unfused fusosomes in the biological sample, e.g., by centrifugation. In some embodiments, the method further comprises enriching recipient cells relative to unfused fusosomes in the biological sample, e.g., by centrifugation. In some embodiments, the method further comprises enriching target cells relative to non-target cells in the biological sample, e.g., by FACS.

[0703] In some embodiments of the methods of assessing fusosome content of a target cell (e.g., fusosome fusion to a target cell) in a subject, the activity relating to the fusosome composition is chosen from the presence or level of a metabolite, the presence or level of a biomarker (e.g., a protein level or post-translational modification, e.g., phosphorylation or cleavage).

[0704] In some embodiments of the methods of assessing fusosome content of a target cell (e.g., fusosome fusion to a target cell) in a subject, the activity relating to the fusosome composition is immunogenicity. In embodiments, the target cell is a CD3+ cell and the biological sample is a blood sample collected from the subject. In embodiments, blood cells are enriched from the blood sample, e.g., using a buffered ammonium chloride solution. In embodiments, enriched blood cells are incubated with an anti-CD3 antibody (e.g., a murine anti-CD3-FITC antibody) and CD3+ cells are selected, e.g., by fluorescence activated cell sorting. In embodiments, cells, e.g., sorted cells, e.g., CD3+ cells are analyzed for the presence of antibodies on the cell surface, e.g., by staining with an anti-IgM antibody. In some embodiments, if antibodies are present at a level above a reference level, the subject is identified as having an immune response against recipient cells.

[0705] In embodiments, immunogenicity is assayed by a cell lysis assay. In embodiments, recipient cells from the biological sample are co-incubated with immune effector cells capable of lysing other cells. In embodiments, the immune effector cells are from the subject or from a subject not administered the fusosome composition. For instance, in embodiments, immunogenicity is assessed by a PBMC cell lysis assay. In embodiments, recipient cells from the biological sample are co-incubated with peripheral blood mononuclear cells (PBMCs) from the subject or control PBMCs from a subject not administered the fusosome composition and then assessed for lysis of the recipient cells by PBMCs. In embodiments, immunogenicity is assessed by a natural killer (NK) cell lysis assay. In embodiments, recipient cells are co-incubated with NK cells from the subject or control NK cells from a subject not administered the fusosome composition and then assessed for lysis of the recipient cells by the NK cells. In embodiments, immunogenicity is assessed by a CD8+ T-cell lysis assay. In embodiments, recipient cells are co-incubated with CD8+ T-cells from the subject or control CD8+ T-cells from a subject not administered the fusosome composition and then assessed for lysis of the target cells by the CD8+ T-cells. In some embodiments, if cell lysis occurs at a level above a reference level, the subject is identified as having an immune response against recipient cells.

[0706] In some embodiments, immunogenicity is assayed by phagocytosis of recipient cells, e.g., by macrophages. In embodiments, recipient cells are not targeted by macrophages for phagocytosis. In embodiments, the biological sample is a blood sample collected from the subject. In embodiments, blood cells are enriched from the blood sample, e.g., using a buffered ammonium chloride solution. In embodiments, enriched blood cells are incubated with an anti-CD3 antibody (e.g., a murine anti-CD3-FITC antibody) and CD3+ cells are selected, e.g., by fluorescence activated cell sorting. In embodiments, fluorescently-labeled CD3+ cells are incubated with macrophages and then tested for intracellular fluorescence within the macrophages, e.g., by flow cytometry. In some embodiments, if macrophage phagocytosis occurs at a level above a reference level, the subject is identified as having an immune response against recipient cells.

### IX. Physical and Functional Characteristics of Fusosomes

[0707] In some embodiments, the fusosome is capable of delivering (e.g., delivers) an agent, e.g., a protein, nucleic acid (e.g., mRNA), organelle, or metabolite to the cytosol of a target cell. Similarly, in some embodiments, a method herein comprises delivering an agent to the cytosol of a target cell. In some embodiments, the agent is a protein (or a nucleic acid encoding the protein, e.g., an mRNA encoding the protein) which is absent, mutant, or at a lower level than wild-type in the target cell. In some embodiments, the target cell is from a subject having a genetic disease, e.g., a monogenic disease, e.g., a monogenic intracellular protein disease. In some embodiments, the agent comprises a transcription factor, e.g., an exogenous transcription factor or an endogenous transcription factor. In some embodiments, the fusosome further comprises, or the method further comprises delivering, one or more (e.g., at least 2, 3, 4, 5, 10, 20, or 50) additional transcription factors, e.g., exogenous transcription factors, endogenous transcription factors, or a combination thereof.

[0708] In some embodiments, the fusosome comprises (e.g., is capable of delivering to the target cell) a plurality of agents (e.g., at least 2, 3, 4, 5, 10, 20, or 50 agents), wherein each agent of the plurality acts on a step of a pathway in the target cell, e.g., wherein the pathway is a biosynthetic pathway, a catabolic pathway, or a signal transduction cascade. In embodiments, each agent in the plurality upregulates the pathway or downregulates the pathway. In some embodiments, the fusosome further comprises, or the method further comprises delivering, one more additional agents (e.g., comprises a second plurality of agents) that do not act on a step of the pathway, e.g., that act on a step of a second pathway. In some embodiments, the fusosome comprises (e.g., is capable of delivering to the target cell), or the method further comprises delivering, a plurality of agents (e.g., at least 2, 3, 4, 5, 10, 20, or 50 agents), wherein each agent of the plurality is part of a single pathway, e.g., wherein the pathway is a biosynthetic pathway, a catabolic pathway, or a signal transduction cascade. In some embodiments, the fusosome further comprises, or the method further comprises delivering, one more additional agents (e.g., comprises a second plurality of agents) that are not part of the single pathway, e.g., are part of a second pathway.

[0709] In some embodiments, the target cell comprises an aggregated or misfolded protein. In some embodiments, the fusosome is capable of reducing levels (e.g., reduces levels) of the aggregated or misfolded protein in the target cell, or a method herein comprises reducing levels of the aggregated or misfolded protein in the target cell.

[0710] In some embodiments, the agent is selected from a transcription factor, enzyme (e.g., nuclear enzyme or cytosolic enzyme), reagent that mediates a sequence specific modification to DNA (e.g., Cas9, ZFN, or TALEN), mRNA (e.g., mRNA encoding an intracellular protein), organelle, or metabolite.

[0711] In some embodiments, the fusosome is capable of delivering (e.g., delivers) an agent, e.g., a protein, to the cell membrane of a target cell. Similarly, in some embodiments, a method herein comprises delivering an agent to the cell membrane of a target cell. In some embodiments, delivering the protein comprises delivering a nucleic acid (e.g., mRNA) encoding the protein to the target cell such that the target cell produces the protein and localizes it to the membrane. In some embodiments, the fusosome comprises, or the method further comprises delivering, the protein, and fusion of the fusosome with the target cell transfers the protein to the cell membrane of the target cell. In some embodiments, the agent comprises a cell surface ligand or an antibody that binds a cell surface receptor. In some embodiments, the fusosome further comprises, or the method further comprises delivering, a second agent that comprises or encodes a second cell surface ligand or antibody that binds a cell surface receptor, and optionally further comprising or encoding one or more additional cell surface ligands or antibodies that bind a cell surface receptor (e.g., 1, 2, 3, 4, 5, 10, 20, 50, or more). In some embodiments, the first agent and the second agent form a complex, wherein optionally the complex further comprises one or more additional cell surface ligands. In some embodiments, the agent comprises or encodes a cell surface receptor, e.g., an exogenous cell surface receptor. In some embodiments, the fusosome further comprises, or the method further comprises delivering, a second agent that comprises or encodes a second cell surface receptor, and optionally further comprises or encodes one or more additional cell surface receptors (e.g., 1, 2, 3, 4, 5, 10, 20, 50, or more cell surface receptors).

[0712] In some embodiments, the first agent and the second agent form a complex, wherein optionally the complex further comprises one or more additional cell surface receptors. In some embodiments, the agent comprises or encodes an antigen or an antigen presenting protein.

[0713] In some embodiments, the fusosome is capable of delivering (e.g., delivers) a secreted agent, e.g., a secreted protein to a target site (e.g., an extracellular region), e.g., by delivering a nucleic acid (e.g., mRNA) encoding the protein to the target cell under conditions that allow the target cell to produce and secrete the protein. Similarly, in some embodiments, a method herein comprises delivering a secreted agent as described herein. In embodiments, the secreted protein is endogenous or exogenous. In embodiments, the secreted protein comprises a protein therapeutic, e.g., an antibody molecule, a cytokine, or an enzyme. In embodiments, the secreted protein comprises an autocrine signalling molecule or a paracrine signalling molecule. In embodiments, the secreted agent comprises a secretory granule.

[0714] In some embodiments, the fusosome is capable of reprogramming (e.g., reprograms) a target cell (e.g., an immune cell), e.g., by delivering an agent selected from a transcription factor or mRNA, or a plurality of said agents. Similarly, in some embodiments, a method herein comprises reprogramming a target cell. In embodiments, reprogramming comprises inducing a pancreatic endocrine cell to take on one or more characteristics of a pancreatic beta cell, by inducing a non-dopaminergic neuron to take on one or more characteristics of a dopaminergic neuron, or by inducing an exhausted T cell to take on one or more characteristics of a non-exhausted T cell, e.g., a killer T cell. In some embodiments, the agent comprises an antigen. In some embodiments, the fusosome comprises a first agent comprising an antigen and a second agent comprising an antigen presenting protein.

[0715] In some embodiments, the fusosome is capable of donating (e.g., donates) one or more cell surface receptors to a target cell (e.g., an immune cell). Similarly, in some embodiments, a method herein comprises donating one or more cell surface receptors.

[0716] In some embodiments, a fusosome is capable of modifying, e.g., modifies, a target tumor cell. Similarly, in some embodiments, a method herein comprises modifying a target tumor cell. In embodiments, the fusosome comprises an mRNA encoding an immunostimulatory ligand, an antigen presenting protein, a tumor suppressor protein, or a pro-apoptotic protein. In some embodiments, the fusosome comprises an miRNA capable of reducing levels in a target cell of an immunosuppressive ligand, a mitogenic signal, or a growth factor.

[0717] In some embodiments, a fusosome comprises an agent that is immunomodulatory, e.g., immunostimulatory.

[0718] In some embodiments, a fusosome is capable of causing (e.g., causes) the target cell to present an antigen. Similarly, in some embodiments, a method herein comprises presenting an antigen on a target cell.

[0719] In some embodiments, the fusosome promotes regeneration in a target tissue. Similarly, in some embodiments, a method herein comprises promoting regeneration in a target tissue. In embodiments, the target cell is a cardiac cell, e.g., a cardiomyocyte (e.g., a quiescent cardiomyocyte), a hepatoblast (e.g., a bile duct hepatoblast), an epithelial cell, a naïve T cell, a macrophage (e.g., a tumor infiltrating macrophage), or a fibroblast (e.g., a cardiac fibroblast). In embodiments, the source cell is a T cell (e.g., a Treg), a macrophage, or a cardiac myocyte.

[0720] In some embodiments, the fusosome is capable of delivering (e.g., delivers) a nucleic acid to a target cell, e.g., to stably modify the genome of the target cell, e.g., for gene therapy. Similarly, in some embodiments, a method herein comprises delivering a nucleic acid to a target cell. In some embodiments, the target cell has an enzyme deficiency, e.g., comprises a mutation in an enzyme leading to reduced activity (e.g., no activity) of the enzyme.

[0721] In some embodiments, the fusosome is capable of delivering (e.g., delivers) a reagent that mediates a sequence specific modification to DNA (e.g., Cas9, ZFN, or TALEN) in the target cell. Similarly, in some embodiments, a method herein comprises delivering the reagent to the target cell. In embodiments, the target cell is a CNS cell.

[0722] In some embodiments, the fusosome is capable of delivering (e.g., delivers) a nucleic acid to a target cell, e.g., to transiently modify gene expression in the target cell.

[0723] In some embodiments, the fusosome is capable of delivering (e.g., delivers) a protein to a target cell, e.g., to transiently rescue a protein deficiency. Similarly, in some embodiments, a method herein comprises delivering a protein to a target cell. In embodiments, the protein is a membrane protein (e.g., a membrane transporter protein), a cytoplasmic protein (e.g., an enzyme), or a secreted protein (e.g., an immunosuppressive protein).

[0724] In some embodiments, the fusosome is capable of delivering (e.g., delivers) an organelle to a target cell, e.g., wherein the target cell has a defective organelle network. Similarly, in some embodiments, a method herein comprises delivering an organelle to a target cell. In embodiments, the source cell is a hepatocyte, skeletal muscle cell, or neuron.

[0725] In some embodiments, the fusosome is capable of delivering (e.g., delivers) a nucleus to a target cell, e.g., wherein the target cell has a genetic mutation. Similarly, in some embodiments, a method herein comprises delivering a nucleus to a target cell. In some embodiments, the nucleus is autologous and comprises one or more genetic changes relative to the target cell, e.g., it comprises a sequence specific modification to DNA (e.g., Cas9, ZFN, or TALEN), or an artificial chromosome, an additional genetic sequence integrated into the genome, a deletion, or any combination thereof. In embodiments, the source of the autologous nucleus is a stem cell, e.g., a hematopoietic stem cell. In embodiments, the target cell is a muscle cell (e.g., a skeletal muscle cell or cardiomyocyte), a hepatocyte, or a neuron.

[0726] In some embodiments, the fusosome is capable of intracellular molecular delivery, e.g., delivers a protein agent to a target cell. Similarly, in some embodiments, a method herein comprises delivering a molecule to an intracellular region of a target cell. In embodiments, the protein agent is an inhibitor. In embodiments, the protein agent comprises a nanobody, scFv, camelid antibody, peptide, macrocycle, or small molecule.

[0727] In some embodiments, the fusosome is capable of causing (e.g., causes) a target cell to secrete a protein, e.g., a therapeutic protein. Similarly, in some embodiments, a method herein comprises causing a target cell to secrete a protein.

[0728] In some embodiments, the fusosome is capable of secreting (e.g., secretes) an agent, e.g., a protein. In some embodiments, the agent, e.g., secreted agent, is delivered to a target site in a subject. In some embodiments, the agent is a protein that can not be made recombinantly or is difficult to make recombinantly. In some embodiments, the fusosome that secretes a protein is from a source cell selected from an MSC or a chondrocyte.

[0729] In some embodiments, the fusosome comprises on its membrane one or more cell surface ligands (e.g., 1, 2, 3, 4, 5, 10, 20, 50, or more cell surface ligands). Similarly, in some embodiments, a method herein comprises presenting one or more cell surface ligands to a target cell. In some embodiments, the fusosome having a cell surface ligand is from a source cell chosen from a neutrophil (e.g., and the target cell is a tumor-infiltrating lymphocyte), dendritic cell (e.g., and the target cell is a naïve T cell), or neutrophil (e.g., and the target is a tumor cell or virus-infected cell). In some embodiments the fusosome comprises a membrane complex, e.g., a complex comprising at least 2, 3, 4, or 5 proteins, e.g., a homodimer, heterodimer, homotrimer, heterotrimer, homotetramer, or heterotetramer. In some embodiments, the fusosome comprises an antibody, e.g., a toxic antibody, e.g., the fusosome is capable of delivering the antibody to the target site, e.g., by homing to a target site. In some embodiments, the source cell is an NK cell or neutrophil.

[0730] In some embodiments, a method herein comprises causing secretion of a protein from a target cell or ligand presentation on the surface of a target cell. In some embodiments, the fusosome is capable of causing cell death of the target cell. In some embodiments, the fusosome is from a NK source cell.

[0731] In some embodiments, a fusosome or target cell is capable of phagocytosis (e.g., of a pathogen). Similarly, in some embodiments, a method herein comprises causing phagocytosis.

[0732] In some embodiments, a fusosome senses and responds to its local environment. In some embodiments, the fusosome is capable of sensing level of a metabolite, interleukin, or antigen.

[0733] In embodiments, a fusosome is capable of chemotaxis, extravasation, or one or more metabolic activities. In embodiments, the metabolic activity is selected from kyneurinine, gluconeogenesis, prostaglandin fatty acid oxidation, adenosine metabolism, urea cycle, and thermogenic respiration. In some embodiments, the source cell is a neutrophil and the fusosome is capable of homing to a site of injury. In some embodiments, the source cell is a macrophage and the fusosome is capable of phagocytosis. In some embodiments, the source cell is a brown adipose tissue cell and the fusosome is capable of lipolysis.

[0734] In some embodiments, the fusosome comprises (e.g., is capable of delivering to the target cell) a plurality of agents (e.g., at least 2, 3, 4, 5, 10, 20, or 50 agents). In embodiments, the fusosome comprises an inhibitory nucleic acid (e.g., siRNA or miRNA) and an mRNA.

[0735] In some embodiments, the fusosome comprises (e.g., is capable of delivering to the target cell) a membrane protein or a nucleic acid encoding the membrane protein. In embodiments, the fusosome is capable of reprogramming or transdifferentiating a target cell, e.g., the fusosome comprises one or more agents that induce reprogramming or transdifferentiation of a target cell.

[0736] In some embodiments, the subject is in need of regeneration. In some embodiments, the subject suffers from cancer, an autoimmune disease, an infectious disease, a metabolic disease, a neurodegenerative disease, or a genetic disease (e.g., enzyme deficiency).

[0737] In some embodiments (e.g., embodiments for assaying non-endocytic delivery of cargo) cargo delivery is assayed using one or more of (e.g., all of) the following steps: (a) placing 30,000 HEK-293T target cells into a first well of a 96-well plate comprising 100 nM bafilomycin A1, and placing a similar number of similar cells into a second well of a 96-well plate lacking bafilomycin A1, (b) culturing the target cells for four hours in DMEM media at 37° C. and 5% CO2, (c) contacting the target cells with 10 ug of fusosomes that comprise cargo, (d) incubating the target cells and fusosomes for 24 hrs at 37° C. and 5% CO2, and (e) determining the percentage of cells in the first well and in the second well that comprise the cargo. Step (e) may comprise detecting the cargo using microscopy, e.g., using immunofluorescence. Step (e) may comprise detecting the cargo indirectly, e.g., detecting a downstream effect of the cargo, e.g., presence of a reporter protein. In some embodiments, one or more of steps (a)-(e) above is performed as described in Example 80.

[0738] In some embodiments, an inhibitor of endocytosis (e.g., chloroquine or bafilomycin Al) inhibits inhibits endosomal acidification. In some embodiments, cargo delivery is independent of lysosomal acidification. In some embodiments, an inhibitor of endocytosis (e.g., Dynasore) inhibits dynamin. In some embodiments, cargo delivery is independent of dynamin activity.

[0739] In some embodiments (e.g., embodiments for specific delivery of cargo to a target cell versus a non-target cell), cargo delivery is assayed using one or more of (e.g., all of) the following steps: (a) placing 30,000 HEK-293T target cells that over-express CD8a and CD8b into a first well of a 96-well plate and placing 30,000 HEK-293T non-target cells that do not over-express CD8a and CD8b into a second well of a 96-well plate, (b) culturing the cells for four hours in DMEM media at 37° C. and 5% CO2, (c) contacting the target cells with 10 ug of fusosomes that comprise cargo, (d) incubating the target cells and fusosomes for 24 hrs at 37° C. and 5% CO2, and (e) determining the percentage of cells in the first well and in the second well that comprise the cargo. Step (e) may comprise detecting the cargo using microscopy, e.g., using immunofluorescence. Step (e) may comprise detecting the cargo indirectly, e.g., detecting a downstream effect of the cargo, e.g., presence of a reporter protein. In some embodiments, one or more of steps (a)-(e) above is performed as described in Example 71.

[0740] In some embodiments, the fusosome fuses at a higher rate with a target cell than with a non-target cell, e.g., by at least at least 1%, 2%, 3%, 4%, 5%, 10%, 20%, 30%, 40%, 50%, 60%, 70%, 80%, 90%, 2-fold, 3-fold, 4-fold, 5-fold, 10-fold, 20-fold, 50-fold, or 100-fold, e.g., in an assay of Example 42 In some embodiments, the fusosome fuses at a higher rate with a target cell than with other fusosomes, e.g., by at least 10%, 20%, 30%, 40%, 50%, 60%, 70%, 80%, or 90%, e.g., in an assay of Example 42. In some embodiments, the fusosome fuses with target cells at a rate such that an agent in the fusosome is delivered to at least 10%, 20%, 30%, 40%, 50%, 60%, 70%, 80%, or 90%, of target cells after 24, 48, or 72 hours, e.g., in an assay of Example 42. In embodiments, the amount of targeted fusion is about 30%-70%, 35%-65%, 40%-60%, 45%-55%, or 45%-50%, e.g., about 48.8% e.g., in an assay of Example 42. In embodiments, the amount of targeted fusion is about 20%-40%, 25%-35%, or 30%-35%, e.g., about 32.2% e.g., in an assay of Example 43.

[0741] In some embodiments, the fusogen is present at a copy number of at least, or no more than, 10, 50, 100, 500, 1,000, 2,000, 5,000, 10,000, 20,000, 50,000, 100,000, 200,000, 500,000, 1,000,000, 5,000,000, 10,000,000, 50,000,000, 100,000,000, 500,000,000, or 1,000,000,000 copies, e.g., as measured by an assay of Example 26. In some embodiments, at least 10%, 20%, 30%, 40%, 50%, 60%, 70%, 80%, 90%, 95%, 96%, 97%, 98%, or 99% of the fusogen comprised by the fusosome is disposed in the cell membrane. In embodiments, the fusosome also comprises fusogen internally, e.g., in the cytoplasm or an organelle. In some embodiments, the fusogen comprises (or is identified as comprising) about 0.1%, 0.2%, 0.3%, 0.4%, 0.5%, 0.6%, 0.7%, 0.8%, 0.9%, 1%, 5%, 10%, 11%, 12%, 13%, 14%, 15%, 20%, or more, or about 1-30%, 5-20%, 10-15%, 12-15%, 13-14%, or 13.6% of the total protein in a fusosome, e.g., as determined according to the method described in Example 94 and/or by a mass spectrometry assay. In embodiments, the fusogen comprises(or is identified as comprising) about 13.6% of the total protein in the fusosome. In some embodiments, the fusogen is (or is identified as being) more or less abundant than one or more additional proteins of interest, e.g., as determined according to the method described in Example 94. In an embodiment, the fusogen has (or is identified as having) a ratio to EGFP of about 140, 145, 150, 151, 152, 153, 154, 155, 156, 157 (e.g., 156.9), 158, 159, 160, 165, or 170. In another embodiment, the fusogen has (or is identified as having) a ratio to CD63 of about 2700, 2800, 2900, 2910 (e.g., 2912), 2920, 2930, 2940, 2950, 2960, 2970, 2980, 2990, or 3000, or about 1000-5000, 2000-4000, 2500-3500, 2900-2930, 2910-2915, or 2912.0, e.g., by a mass spectrometry assay. In an embodiment, the fusogen has (or is identified as having) a ratio to ARRDC1 of about 600, 610, 620, 630, 640, 650, 660 (e.g., 664.9), 670, 680, 690, or 700. In another embodiment, the fusogen has (or is identified as having) a ratio to GAPDH of about 50, 55, 60, 65, 70 (e.g., 69), 75, 80, or 85, or about 1-30%, 5-20%, 10-15%, 12-15%, 13-14%, or 13.6%. In another embodiment, the fusogen has (or is identified as having) a ratio to CNX of about 500, 510, 520, 530, 540, 550, 560 (e.g., 558.4), 570, 580, 590, or 600, or about 300-800, 400-700, 500-600, 520-590, 530-580, 540-570, 550-560, or 558.4, e.g., by a mass spectrometry assay.

[0742] In some embodiments, the fusosome comprises a therapeutic agent at a copy number of at least, or no more than, 10, 50, 100, 500, 1,000, 2,000, 5,000, 10,000, 20,000, 50,000, 100,000, 200,000, 500,000, 1,000,000, 5,000,000, 10,000,000, 50,000,000, 100,000,000, 500,000,000, or 1,000,000,000 copies, e.g., as measured by an assay of Example 88. In some embodiments, the fusosome comprises a protein therapeutic agent at a copy number of at least 10, 50, 100, 500, 1,000, 2,000, 5,000, 10,000, 20,000, 50,000, 100,000, 200,000, 500,000, 1,000,000, 5,000,000, 10,000,000, 50,000,000, 100,000,000, 500,000,000, or 1,000,000,000 copies, e.g., as measured by an assay of Example 88. In some embodiments, the fusosome comprises a nucleic acid therapeutic agent at a copy number of at least 10, 50, 100, 500, 1,000, 2,000, 5,000, 10,000, 20,000, 50,000, 100,000, 200,000, 500,000, 1,000,000, 5,000,000, 10,000,000, 50,000,000, 100,000,000, 500,000,000, or 1,000,000,000 copies. In some embodiments, the fusosome comprises a DNA therapeutic agent at a copy number of at least 10, 50, 100, 500, 1,000, 2,000, 5,000, 10,000, 20,000, 50,000, 100,000, 200,000, 500,000, 1,000,000, 5,000,000, 10,000,000, 50,000,000, 100,000,000, 500,000,000, or 1,000,000,000 copies. In some embodiments, the fusosome comprises an RNA therapeutic agent at a copy number of at least 10, 50, 100, 500, 1,000, 2,000, 5,000, 10,000, 20,000, 50,000, 100,000, 200,000, 500,000, 1,000,000, 5,000,000, 10,000,000, 50,000,000, 100,000,000, 500,000,000, or 1,000,000,000 copies. In some embodiments, the fusosome comprises an exogenous therapeutic agent at a copy number of at least 10, 50, 100, 500, 1,000, 2,000, 5,000, 10,000, 20,000, 50,000, 100,000, 200,000, 500,000, 1,000,000, 5,000,000, 10,000,000, 50,000,000, 100,000,000, 500,000,000, or 1,000,000,000 copies. In some embodiments, the fusosome comprises an exogenous protein therapeutic agent at a copy number of at least 10, 50, 100, 500, 1,000, 2,000, 5,000, 10,000, 20,000, 50,000, 100,000, 200,000, 500,000, 1,000,000, 5,000,000, 10,000,000, 50,000,000, 100,000,000, 500,000,000, or 1,000,000,000 copies. In some embodiments, the fusosome comprises an exogenous nucleic acid (e.g., DNA or RNA) therapeutic agent at a copy number of at least 10, 50, 100, 500, 1,000, 2,000, 5,000, 10,000, 20,000, 50,000, 100,000, 200,000, 500,000, 1,000,000, 5,000,000, 10,000,000, 50,000,000, 100,000,000, 500,000,000, or 1,000,000,000 copies. In some embodiments, the ratio of the copy number of the fusogen to the copy number of the therapeutic agent is between 1,000,000:1 and 100,000:1, 100,000:1 and 10,000:1, 10,000:1 and 1,000:1, 1,000:1 and 100:1, 100:1 and 50:1, 50:1 and 20:1, 20:1 and 10:1, 10:1 and 5:1, 5:1 and 2:1, 2:1 and 1:1, 1:1 and 1:2, 1:2 and 1:5, 1:5 and 1:10, 1:10 and 1:20, 1:20 and 1:50, 1:50 and 1:100, 1:100 and 1:1,000, 1:1,000 and 1:10,000, 1:10,000 and 1:100,000, or 1:100,000 and 1:1,000,000.

[0743] In some embodiments, the fusosome delivers to a target cell at least 10, 50, 100, 500, 1,000, 2,000, 5,000, 10,000, 20,000, 50,000, 100,000, 200,000, 500,000, 1,000,000, 5,000,000, 10,000,000, 50,000,000, 100,000,000, 500,000,000, or 1,000,000,000 copies of a therapeutic agent. In some embodiments, the fusosome delivers to a target cell at least 10, 50, 100, 500, 1,000, 2,000, 5,000, 10,000, 20,000, 50,000, 100,000, 200,000, 500,000, 1,000,000, 5,000,000, 10,000,000, 50,000,000, 100,000,000, 500,000,000, or 1,000,000,000 copies of a protein therapeutic agent. In some embodiments, the fusosome delivers to a target cell at least 10, 50, 100, 500, 1,000, 2,000, 5,000, 10,000, 20,000, 50,000, 100,000, 200,000, 500,000, 1,000,000, 5,000,000, 10,000,000, 50,000,000, 100,000,000, 500,000,000, or 1,000,000,000 copies of a nucleic acid therapeutic agent. In some embodiments, the fusosome delivers to a target cell at least 10, 50, 100, 500, 1,000, 2,000, 5,000, 10,000, 20,000, 50,000, 100,000, 200,000, 500,000, 1,000,000, 5,000,000, 10,000,000, 50,000,000, 100,000,000, 500,000,000, or 1,000,000,000 copies of an RNA therapeutic agent. In some embodiments, the fusosome delivers to a target cell at least 10, 50, 100, 500, 1,000, 2,000, 5,000, 10,000, 20,000, 50,000, 100,000, 200,000, 500,000, 1,000,000, 5,000,000, 10,000,000, 50,000,000, 100,000,000, 500,000,000, or 1,000,000,000 copies of a DNA therapeutic agent.

[0744] In some embodiments, the fusosome delivers to a target cell at least 10%, 20%, 30%, 40%, 50%, 60%, 70%, 80%, 90%, 95%, 96%, 97%, 98%, or 99% of the cargo (e.g., a therapeutic agent, e.g., an endogenous therapeutic agent or an exogenous therapeutic agent) comprised by the fusosome. In some embodiments, the fusosomes that fuse with the target cell(s) deliver to the target cell an average of at least 10%, 20%, 30%, 40%, 50%, 60%, 70%, 80%, 90%, 95%, 96%, 97%, 98%, or 99% of the cargo (e.g., a therapeutic agent, e.g., an endogenous therapeutic agent or an exogenous therapeutic agent) comprised by the fusosomes that fuse with the target cell(s). In some embodiments, the fusosome composition delivers to a target tissue at least 10%, 20%, 30%, 40%, 50%, 60%, 70%, 80%, 90%, 95%, 96%, 97%, 98%, or 99% of the cargo (e.g., a therapeutic agent, e.g., an endogenous therapeutic agent or an exogenous therapeutic agent) comprised by the fusosome composition.

[0745] In some embodiments, the fusosome comprises 0.00000001 mg fusogen to 1 mg fusogen per mg of total protein in fusosome, e.g., 0.00000001-0.0000001, 0.0000001-0.000001, 0.000001-0.00001, 0.00001-0.0001, 0.0001-0.001, 0.001-0.01, 0.01-0.1, or 0.1-1 mg fusogen per mg of total protein in fusosome. In some embodiments, the fusosome comprises 0.00000001 mg fusogen to 5 mg fusogen per mg of lipid in fusosome, e.g., 0.00000001-0.0000001, 0.0000001-0.000001, 0.000001-0.00001, 0.00001-0.0001, 0.0001-0.001, 0.001-0.01, 0.01-0.1, 0.1-1, or 1-5 mg fusogen per mg of lipid in fusosome.

[0746] In some embodiments, the cargo is a protein cargo. In embodiments, the cargo is an endogenous or synthetic protein cargo. In some embodiments, the fusosomes have (or are identified as having) at least 1, 2, 3, 4, 5, 10, 20, 50, 100, or more protein cargo molecules per fusosome. In an embodiment, the fusosomes have (or are identified as having) about 100, 110, 120, 130, 140, 150, 160, 166, 170, 180, 190, or 200 protein agent molecules per fusosome, e.g., as quantified according to the method described in Example 88. In some embodiments, the endogenous or synthetic protein cargo comprises (or is identified as comprising) about 0.1%, 0.2%, 0.3%, 0.4%, 0.5%, 1%, 5%, 10%, 15%, 20%, 25% or more of the total protein in a fusosome. In an embodiment, the synthetic protein cargo comprises (or is identified as comprising) about 13.6% of the total protein in a fusosome. In some embodiments, the synthetic protein cargo has (or is identified as having) a ratio to VSV-G of about 4×10⁻³, 5×10⁻³, 6×10⁻³ (e.g., 6.37×10⁻³), 7×10⁻³, or 8×10⁻³. In embodiments, the synthetic protein cargo has (or is identified as having) a ratio to CD63 of about 10, 15, 16, 17, 18 (e.g., 18.6), 19, 20, 25, or 30, or about 10-30, 15-25, 16-19, 18-19, or 18.6. In embodiments, the synthetic protein cargo has (or is identified as having) a ratio to ARRDC1 of about 2, 3, 4 (e.g., 4.24), 5, 6, or 7. In embodiments, the synthetic protein cargo has (or is identified as having) a ratio to GAPDH of about 0.1, 0.2, 0.3, 0.4 (e.g., 0.44), 0.5, 0.6, or 0.7. In embodiments, the synthetic protein cargo has (or is identified as having) a ratio to CNX of about 1, 2, 3 (e.g., 3.56), 4, 5, or 6. In embodiments, the synthetic protein cargo has (or is identified as having) a ratio to TSG101 of about 10, 15, 16, 17, 18, 19 (e.g., 19.52), 20, 21, 22, 23, 24, 25, or 30.

[0747] In some embodiments, the fusogen comprises (or is identified as comprising) at least 0.5%, 1%, 5%, 10%, or more of the total protein in a fusosome, e.g., by a mass spectrometry assay. In an embodiment, the fusogen comprises (or is identified as comprising) about 1-30%, 5-20%, 10-15%, 12-15%, 13-14%, or 13.6% of the total protein in a fusosome, e.g., by a mass spectrometry assay. In some embodiments, the fusogen is more abundant than other proteins of interest. In embodiments, the fusogen has (or is identified as having) a ratio to a payload protein, e.g., EGFP, of about 145-170, 150-165, 155-160, 156.9, e.g., by a mass spectrometry assay. In embodiments, the fusogen has(or is identified as having) a ratio to CD63 of about 1000-5000, 2000-4000, 2500-3500, 2900-2930, 2910-2915, or 2912.0, e.g., by a mass spectrometry assay. In embodiments, the fusogen has a ratio to ARRDC1 of about 300-1000, 400-900, 500-800, 600-700, 640-690, 650-680, 660-670, or 664.9, e.g., by a mass spectrometry assay. In embodiments, the fusogen has(or is identified as having) a ratio to GAPDH of about 20-120, 40-100, 50-90, 60-80, 65-75, 68-70, or 69.0, e.g., by a mass spectrometry assay. In embodiments, the fusogen has a ratio to CNX of about 200-900, 300-800, 400-700, 500-600, 520-590, 530-580, 540-570, 550-560, or 558.4, e.g., by a mass spectrometry assay. In embodiments, the mass spectrometry essay is an assay of Example 94.

[0748] In some embodiments, the number of lipid species present in both of (e.g., shared between) the fusosomes and source cells is (or is identified as being) at least 300, 400, 500, 550, 560, or 569, or is between 500-700, 550-600, or 560-580, e.g., using a mass spectrometry assay. In embodiments, the number of lipid species present in fusosomes at a level at least 25% of the corresponding lipid level in the source cells (both normalized to total lipid levels within a sample) is (or is identified as being) at least 300, 400, 500, 530, 540, or 548, or is between 400-700, 500-600, 520-570, 530-560, or 540-550, e.g., using a mass spectrometry assay. In some embodiments, the fraction of lipid species present in both of (e.g., shared between) the fusosomes and source cells to total lipid species in the source cell is (or is identified as being) about 0.4-1.0, 0.5-0.9, 0.6-0.8, or 0.7, or at least 0.4, 0.5, 0.6, or 0.7, e.g., using a mass spectrometry assay. In some embodiments, the mass spectrometry assay is an assay of Example 86.

[0749] In some embodiments, the number of protein species present in both of (e.g., shared between) the fusosomes are source cells is (or is identified as being) at least 500, 1000, 1100, 1200, 1300, 1400, 1487, 1500, or 1600, or is (or is identified as being) between 1200-1700, 1300-1600, 1400-1500, 1450-1500, or 1480-1490, e.g., using a mass spectrometry assay. In embodiments, the number of protein species present in fusosomes at a level at least 25% of the corresponding protein level in the source cells (both normalized to total protein levels within a sample) is (or is identified as being) at least 500, 600, 700, 800, 900, 950, 957, 1000, or 1200, e.g., using a mass spectrometry assay. In some embodiments, the fraction of protein species present in both of (e.g., shared between) the fusosomes and source cells to total protein species in the source cell is (or is identified as being) about 0.1-0.6, 0.2-0.5, 0.3-0.4, or 0.333, or at least about 0.1, 0.2, 0.3, 0.333, or 0.4, e.g., using a mass spectrometry assay. In embodiments, the mass spectrometry assay is an assay of Example 87.

[0750] In some embodiments, CD63 is (or is identified as being) present at less than 0.048%, 0.05%, 0.1%, 0.5%, 1%, 2%, 3%, 4%, 5%, or 10% the amount of total protein in fusosomes, e.g., by a mass spectrometry assay, e.g., an assay of Example 89.

[0751] In some embodiments, the fusosomes are produced by extrusion through a filter, e.g., a filter of about 1-10, 2-8, 3-7, 4-6, or 5 um. In some embodiments, the fusosomes have (or is identified as having) an average diameter of about 1-5, 2-5, 3-5, 4-5, or 5 um. In some embodiments, the fusosomes have (or is identified as having) an average diameter of at least 1, 2, 3, 4, or 5 um.

[0752] In some embodiments, the fusosomes are enriched for (or are identified as being enriched for) one or more of (e.g., at least 2, 3, 4, 5, or all of) the following lipids compared to the source cells: cholesteryl ester, free cholesterol, ether-linked lyso-phosphatidylethanolamine, lyso-phosphatidylserine, phosphatidate, ether-linked phosphatidylethanolamine, phosphatidylserine, and sphingomyelin. In some embodiments, the fusosomes are depleted for (or are identified as being depleted for) one or more of (e.g., at least 2, 3, 4, 5, or all of) the following lipids compared to the source cells: ceramide, cardiolipin, lyso-phosphatidylcholine, lyso-phosphatidylethanolamine, lyso-phosphatidylglycerol, lyso-phosphatidylinositol, ether-linked phosphatidylcholine, phosphatidylethanolamine, phosphatidylglycerol, phosphatidylinositol, and triacylglycerol. In some embodiments, the fusosomes are enriched for (or are identified as being enriched for) one or more of the aforementioned enriched lipids and depleted for one or more of the aforementioned depleted lipids. In some embodiments, the fusosomes comprise (or are identified as comprising) the enriched lipid as a percentage of total lipid that is at least 10%, 20%, 30%, 40%, 50%, 60%, 70%, 80%, 90%, 2-fold, 5-fold, or 10-fold greater than the corresponding level in source cells. In some embodiments, the fusosome comprise (or are identified as comprising) the depleted lipid as a percentage of total lipid at a level that is less than 90%, 80%, 70%, 60%, 50%, 40%, 30%, 20%, or 10% of the corresponding level in the source cells. In embodiments, lipid enrichment is measured by a mass spectrometry assay, e.g., an assay of Example 96.

[0753] In some embodiments, CE lipid levels are (or are identified as being) about 2-fold greater in fusosomes than in exosomes and/or about 5, 6, 7, 8, 9, or 10-fold higher in fusosomes than in parental cells (relative to total lipid in a sample). In some embodiments, ceramide lipid levels are (or are identified as being) about 2, 3, 4, or 5-fold greater in parental cells than in fusosomes (relative to total lipid in a sample). In some embodiments, cholesterol levels are (or are identified as being) about 1.1, 1.2, 1.3, 1.4, 1.5, 1.6, 1.7, 1.8, 1.9, or 2-fold greater in exosomes than in fusosomes and/or about 2-fold higher in fusosomes than in parental cells (relative to total lipid in a sample). In some embodiments, CL lipid levels are (or are identified as being) at least about 5, 10, 20, 30, or 40-fold greater in parental cells than in fusosomes (relative to total lipid in a sample). In some embodiments, DAG lipid levels are (or are identified as being) about 2 or 3-fold greater in exosomes than in fusosomes and/or about 1.5 or 2-fold higher in parental cells than in fusosomes (relative to total lipid in a sample). In some embodiments, PC lipid levels are (or are identified as being) about equal between exosomes and fusosomes and/or about 1.3, 1.4, 1.5, 1.6, 1.7, or 1.8-fold higher in parental cells than in fusosomes (relative to total lipid in a sample). In some embodiments, PC O-lipid levels are (or are identified as being) about equal between exosomes and fusosomes and/or about 2-fold higher in parental cells than in fusosomes (relative to total lipid in a sample). In some embodiments, PE lipid levels are (or are identified as being) about 1.3, 1.4, 1.5, 1.6, 1.7, or 1.8-fold higher in fusosomes than in exosomes and/or about 1.3, 1.4, 1.5, 1.6, 1.7, or 1.8-fold higher in parental cells than in fusosomes (relative to total lipid in a sample). In some embodiments, PE O-lipid levels are (or are identified as being) about equal between exosomes and fusosomes and/or about 1.5, 1.6, 1.7, 1.8, 1.9, or 2-fold higher in parental cells than in fusosomes (relative to total lipid in a sample). In some embodiments, PG lipid levels are (or are identified as being) about equal between exosomes and fusosomes and/or about 2, 3, 4, 5, 6, 7, 8, 9, or 10-fold higher in parental cells than in fusosomes (relative to total lipid in a sample). In some embodiments, PI lipid levels are (or are identified as being) about equal between exosomes and fusosomes and/or about 3, 4, 5, 6, or 7-fold higher in parental cells than in fusosomes (relative to total lipid in a sample). In some embodiments, PS lipid levels are (or are identified as being) (or are identified as being) about equal between exosomes and fusosomes and/or about 2-fold higher in fusosomes than in parental cells (relative to total lipid in a sample). In some embodiments, SM lipid levels are (or are identified as being) about equal between exosomes and fusosomes and/or about 2, 2.5, or 3-fold higher in fusosomes than in parental cells (relative to total lipid in a sample). In some embodiments, TAG lipid levels are (or are identified as being) about equal between exosomes and fusosomes and/or about 10, 20, 30, 40, 50, 60, 70 80, 90, 100-fold, or more higher in parental cells than in fusosomes (relative to total lipid in a sample).

[0754] In some embodiments, the fusosomes are (or are identified as being) enriched for one or more of (e.g., at least 2, 3, 4, 5, or all of) the following lipids compared to exosomes: cholesteryl ester, ceramide, diacylglycerol, lyso-phosphatidate, and phosphatidylethanolamine, and triacylglycerol. In some embodiments, the fusosomes are (or are identified as being) depleted for one or more of (e.g., at least 2, 3, 4, 5, or all of) the following lipids compared to exosomes (relative to total lipid in a sample): free cholesterol, hexosyl ceramide, lyso-phosphatidylcholine, ether-linked lyso-phosphatidylcholine, lyso-phosphatidylethanolamine, ether-linked lyso-phosphatidylethanolamine, and lyso-phosphatidylserine. In some embodiments, the fusosomes are (or are identified as being) enriched for one or more of the aforementioned enriched lipids and depleted for one or more of the aforementioned depleted lipids. In some embodiments, the fusosomes comprise (or are identified as comprising) the enriched lipid as a percentage of total lipid that is at least 10%, 20%, 30%, 40%, 50%, 60%, 70%, 80%, 90%, 2-fold, 5-fold, or 10-fold greater than the corresponding level in exosomes. In some embodiments, the fusosome comprise (or are identified as comprising) the depleted lipid as a percentage of total lipid at a level that is less than 90%, 80%, 70%, 60%, 50%, 40%, 30%, 20%, or 10% of the corresponding level in exosomes. In embodiments, lipid enrichment is measured by a mass spectrometry assay, e.g., an assay of Example 96.

[0755] In some embodiments, ceramide lipid levels are (or are identified as being) about 2-fold higher in fusosomes than in exosomes and/or about 2-fold higher in parental cells than in fusosomes (relative to total lipid in a sample). In some embodiments, HexCer lipid levels are (or are identified as being) about 1.5, 1.6, 1.7, 1.8, 1.9, or 2-fold higher in exosomes than in fusosomes and/or about equal in parental cells and fusosomes (relative to total lipid in a sample). In some embodiments, LPA lipid levels are (or are identified as being) about 3 or 4-fold higher in fusosomes than in exosomes and/or about 1.3, 1.4, 1.5, 1.6, 1.7, or 1.8-fold higher in fusosomes than in parental cells (relative to total lipid in a sample). In some embodiments, LPC lipid levels are (or are identified as being) about 2-fold higher in exosomes than in fusosomes and/or about 1.5, 1.6, 1.7, 1.8, 1.9, or 2-fold higher in parental cells than in fusosomes (relative to total lipid in a sample). In some embodiments, LPC O-lipid levels are (or are identified as being) about 3 or 4-fold higher in exosomes than in fusosomes and/or about equal between parental cells and fusosomes (relative to total lipid in a sample). In some embodiments, LPE lipid levels are (or are identified as being) about 1.5, 1.6, 1.7, 1.8, 1.9, or 2-fold higher in exosomes than in fusosomes and/or about 1.5, 1.6, 1.7, 1.8, 1.9, or 2-fold higher in parental cells than in fusosomes (relative to total lipid in a sample). In some embodiments, LPE O-lipid levels are (or are identified as being) about 2 or 3-fold higher in exosomes than in fusosomes and/or about equal between parental cells and fusosomes (relative to total lipid in a sample). In some embodiments, LPS lipid levels are (or are identified as being) about 3-fold higher in exosomes than in fusosomes (relative to total lipid in a sample). In some embodiments, PA lipid levels are (or are identified as being) about 1.5, 1.6, 1.7, 1.8, 1.9, or 2-fold higher in fusosomes than in exosomes and/or about 2-fold higher in fusosomes than in parental cells (relative to total lipid in a sample). In some embodiments, PG lipid levels are (or are identified as being) about equal between fusosomes and exosomes and/or about 10, 11, 12, 13, 14, or 15-fold higher in parental cells than in fusosomes (relative to total lipid in a sample).

[0756] In some embodiments, the fusosome comprises a lipid composition substantially similar to that of the source cell or wherein one or more of CL, Cer, DAG, HexCer, LPA, LPC, LPE, LPG, LPI, LPS, PA, PC, PE, PG, PI, PS, CE, SM and TAG is within 10%, 15%, 20%, 25%, 30%, 35%, 40%, 45%, or 50% of the corresponding lipid level in the source cell. In embodiments, the lipid composition of fusosomes is similar to the cells from which they are derived. In embodiments, fusosomes and parental cells have (or are identified as having) a similar lipid composition if greater than or equal to about 50%, 55%, 60%, 65%, 70%, 75%, 80%, 85%, or 90% of the lipid species identified in any replicate sample of the parental cells are present (or are identified as being present) in any replicate sample of the fusosomes, e.g., as determined according to Example 86. In embodiments, of identified lipids, the average level in the fusosome is greater than about 10%, 15%, 20%, 25%, 30%, 35%, or 40% of the corresponding average lipid species level in the parental cell (relative to total lipid in a sample). In an embodiment, the lipid composition of the fusosome is enriched and/or depleted for specific lipids relative to the parental cell (relative to total lipid in a sample).

[0757] In some embodiments, the lipid composition of the fusosome is (or is identified as bring) enriched and/or depleted for specific lipids relative to the parental cell, e.g., as determined according to the method described in Example 96.

[0758] In some embodiments, the fusosome has (or is identified as having) a ratio of phosphatidylserine to total lipids that is greater than that of the parental cell. In embodiments, the fusosome has (or is identified as having) a ratio of phosphatidylserine to total lipids of about 110%, 115%, 120%, 121%, 122%, 123%, 124%, 125%, 130%, 135%, 140%, or more relative to that of the parental cell. In some embodiments, the fusosome is (or is identified as being) enriched for cholesteryl ester, free cholesterol, ether-linked lyso-phosphatidylethanolamine, lyso-phosphatidylserine, phosphatidate, ether-linked phosphatidylethanolamine, phosphatidylserine, and/or sphingomyelin relative to the parental cell. In some embodiments, the fusosomes is (or is identified as being) depleted for ceramide, cardiolipin, lyso-phosphatidylcholine, lyso-phosphatidylethanolamine , lyso-phosphatidylglycerol, lyso-phosphatidylinositol, ether-linked phosphatidylcholine, phosphatidylethanolamine, phosphatidylglycerol, phosphatidylinositol, and/or triacylglycerol relative to the parental cell. In some embodiments, the fusosome is (or is identified as being) enriched for cholesteryl ester, ceramide, diacylglycerol, lyso-phosphatidate, phosphatidylethanolamine, and/or triacylglycerol relative to an exosome. In some embodiments, the fusosome is (or is identified as being) depleted for free cholesterol, hexosyl ceramide, lyso-phosphatidylcholine, ether-linked lyso-phosphatidylcholine, lyso-phosphatidylethanolamine, ether-linked lyso-phosphatidylethanolamine, and/or lyso-phosphatidylserine relative to an exosome.

[0759] In some embodiments, the fusosome has a ratio of cardiolipin: ceramide that is within 10%, 20%, 30%, 40%, or 50% of the ratio of cardiolipin: ceramide in the source cell; or has a ratio of cardiolipin: diacylglycerol that is within 10%, 20%, 30%, 40%, or 50% of the ratio of cardiolipin: diacylglycerol in the source cell; or has a ratio of cardiolipin: hexosylceramide that is within 10%, 20%, 30%, 40%, or 50% of the ratio of cardiolipin: hexosylceramide in the source cell; or has a ratio of cardiolipin:lysophosphatidate that is within 10%, 20%, 30%, 40%, or 50% of the ratio of cardiolipin: lysophosphatidate in the source cell; or has a ratio of cardiolipin: lyso-phosphatidylcholine that is within 10%, 20%, 30%, 40%, or 50% of the ratio of cardiolipin: lyso-phosphatidylcholine in the source cell; or has a ratio of cardiolipin: lyso-phosphatidylethanolamine that is within 10%, 20%, 30%, 40%, or 50% of the ratio of cardiolipin: lyso-phosphatidylethanolamine in the source cell; or has a ratio of cardiolipin: lyso-phosphatidylglycerol that is within 10%, 20%, 30%, 40%, or 50% of the ratio of cardiolipin: lyso-phosphatidylglycerol in the source cell; or has a ratio of cardiolipin: lyso-phosphatidylinositol that is within 10%, 20%, 30%, 40%, or 50% of the ratio of cardiolipin: lyso-phosphatidylinositol in the source cell; or has a ratio of cardiolipin: lyso-phosphatidylserine that is within 10%, 20%, 30%, 40%, or 50% of the ratio of cardiolipin: lyso-phosphatidylserine in the source cell; or has a ratio of cardiolipin: phosphatidate that is within 10%, 20%, 30%, 40%, or 50% of the ratio of cardiolipin: phosphatidate in the source cell; or has a ratio of cardiolipin: phosphatidylcholine that is within 10%, 20%, 30%, 40%, or 50% of the ratio of cardiolipin: phosphatidylcholine in the source cell; or has a ratio of cardiolipin: phosphatidylethanolamine that is within 10%, 20%, 30%, 40%, or 50% of the ratio of cardiolipin: phosphatidylethanolamine in the source cell; or has a ratio of cardiolipin: phosphatidylglycerol that is within 10%, 20%, 30%, 40%, or 50% of the ratio of cardiolipin: phosphatidylglycerol in the source cell; or has a ratio of cardiolipin: phosphatidylinositol that is within 10%, 20%, 30%, 40%, or 50% of the ratio of cardiolipin: phosphatidylinositol in the source cell; or has a ratio of cardiolipin: phosphatidylserine that is within 10%, 20%, 30%, 40%, or 50% of the ratio of cardiolipin: phosphatidylserine in the source cell; or has a ratio of cardiolipin: cholesterol ester that is within 10%, 20%, 30%, 40%, or 50% of the ratio of cardiolipin: cholesterol ester in the source cell; or has a ratio of cardiolipin: sphingomyelin that is within 10%, 20%, 30%, 40%, or 50% of the ratio of cardiolipin: sphingomyelin in the source cell; or has a ratio of cardiolipin: triacylglycerol that is within 10%, 20%, 30%, 40%, or 50% of the ratio of cardiolipin: triacylglycerol in the source cell; or has a ratio of phosphatidylcholine: ceramide that is within 10%, 20%, 30%, 40%, or 50% of the ratio of phosphatidylcholine: ceramide in the source cell; or has a ratio of phosphatidylcholine: diacylglycerol that is within 10%, 20%, 30%, 40%, or 50% of the ratio of phosphatidylcholine: diacylglycerol in the source cell; or has a ratio of phosphatidylcholine: hexosylceramide that is within 10%, 20%, 30%, 40%, or 50% of the ratio of phosphatidylcholine: hexosylceramide in the source cell; or has a ratio of phosphatidylcholine:lysophosphatidate that is within 10%, 20%, 30%, 40%, or 50% of the ratio of phosphatidylcholine: lysophosphatidate in the source cell; or has a ratio of phosphatidylcholine: lyso-phosphatidylcholine that is within 10%, 20%, 30%, 40%, or 50% of the ratio of phosphatidylcholine: lyso-phosphatidylcholine in the source cell; or has a ratio of phosphatidylcholine: lyso-phosphatidylethanolamine that is within 10%, 20%, 30%, 40%, or 50% of the ratio of phosphatidylcholine: lyso-phosphatidylethanolamine in the source cell; or has a ratio of phosphatidylcholine: lyso-phosphatidylglycerol that is within 10%, 20%, 30%, 40%, or 50% of the ratio of phosphatidylcholine: lyso-phosphatidylglycerol in the source cell; or has a ratio of phosphatidylcholine: lyso-phosphatidylinositol that is within 10%, 20%, 30%, 40%, or 50% of the ratio of phosphatidylcholine: lyso-phosphatidylinositol in the source cell; or has a ratio of phosphatidylcholine: lyso-phosphatidylserine that is within 10%, 20%, 30%, 40%, or 50% of the ratio of phosphatidylcholine: lyso-phosphatidylserine in the source cell; or has a ratio of phosphatidylcholine: phosphatidate that is within 10%, 20%, 30%, 40%, or 50% of the ratio of cardiolipin: phosphatidate in the source cell; or has a ratio of phosphatidylcholine: phosphatidylethanolamine that is within 10%, 20%, 30%, 40%, or 50% of the ratio of phosphatidylcholine: phosphatidylethanolamine in the source cell; or has a ratio of cardiolipin: phosphatidylglycerol that is within 10%, 20%, 30%, 40%, or 50% of the ratio of phosphatidylcholine: phosphatidylglycerol in the source cell; or has a ratio of phosphatidylcholine: phosphatidylinositol that is within 10%, 20%, 30%, 40%, or 50% of the ratio of phosphatidylcholine: phosphatidylinositol in the source cell; or has a ratio of phosphatidylcholine: phosphatidylserine that is within 10%, 20%, 30%, 40%, or 50% of the ratio of phosphatidylcholine: phosphatidylserine in the source cell; or has a ratio of phosphatidylcholine: cholesterol ester that is within 10%, 20%, 30%, 40%, or 50% of the ratio of phosphatidylcholine: cholesterol ester in the source cell; or has a ratio of phosphatidylcholine: sphingomyelin that is within 10%, 20%, 30%, 40%, or 50% of the ratio of phosphatidylcholine: sphingomyelin in the source cell; or has a ratio of phosphatidylcholine: triacylglycerol that is within 10%, 20%, 30%, 40%, or 50% of the ratio of phosphatidylcholine: triacylglycerol in the source cell; or has a ratio of phosphatidylethanolamine: ceramide that is within 10%, 20%, 30%, 40%, or 50% of the ratio of phosphatidylethanolamine: ceramide in the source cell; or has a ratio of phosphatidylethanolamine: diacylglycerol that is within 10%, 20%, 30%, 40%, or 50% of the ratio of phosphatidylethanolamine: diacylglycerol in the source cell; or has a ratio of phosphatidylethanolamine: hexosylceramide that is within 10%, 20%, 30%, 40%, or 50% of the ratio of phosphatidylethanolamine: hexosylceramide in the source cell; or has a ratio of phosphatidylethanolamine:lysophosphatidate that is within 10%, 20%, 30%, 40%, or 50% of the ratio of phosphatidylethanolamine: lysophosphatidate in the source cell; or has a ratio of phosphatidylethanolamine: lyso-phosphatidylcholine that is within 10%, 20%, 30%, 40%, or 50% of the ratio of phosphatidylethanolamine: lyso-phosphatidylcholine in the source cell; or has a ratio of phosphatidylethanolamine: lyso-phosphatidylethanolamine that is within 10%, 20%, 30%, 40%, or 50% of the ratio of phosphatidylethanolamine: lyso-phosphatidylethanolamine in the source cell; or has a ratio of phosphatidylethanolamine: lyso-phosphatidylglycerol that is within 10%, 20%, 30%, 40%, or 50% of the ratio of phosphatidylethanolamine: lyso-phosphatidylglycerol in the source cell; or has a ratio of phosphatidylethanolamine: lyso-phosphatidylinositol that is within 10%, 20%, 30%, 40%, or 50% of the ratio of phosphatidylethanolamine: lyso-phosphatidylinositol in the source cell; or has a ratio of phosphatidylethanolamine: lyso-phosphatidylserine that is within 10%, 20%, 30%, 40%, or 50% of the ratio of phosphatidylethanolamine: lyso-phosphatidylserine in the source cell; or has a ratio of phosphatidylethanolamine: phosphatidate that is within 10%, 20%, 30%, 40%, or 50% of the ratio of phosphatidylethanolamine: phosphatidate in the source cell; or has a ratio of phosphatidylethanolamine: phosphatidylglycerol that is within 10%, 20%, 30%, 40%, or 50% of the ratio of phosphatidylethanolamine: phosphatidylglycerol in the source cell; or has a ratio of phosphatidylethanolamine: phosphatidylinositol that is within 10%, 20%, 30%, 40%, or 50% of the ratio of phosphatidylethanolamine: phosphatidylinositol in the source cell; or has a ratio of phosphatidylethanolamine: phosphatidylserine that is within 10%, 20%, 30%, 40%, or 50% of the ratio of phosphatidylethanolamine: phosphatidylserine in the source cell; or has a ratio of phosphatidylethanolamine: cholesterol ester that is within 10%, 20%, 30%, 40%, or 50% of the ratio of phosphatidylethanolamine: cholesterol ester in the source cell; or has a ratio of phosphatidylethanolamine: sphingomyelin that is within 10%, 20%, 30%, 40%, or 50% of the ratio of phosphatidylethanolamine: sphingomyelin in the source cell; or has a ratio of phosphatidylethanolamine: triacylglycerol that is within 10%, 20%, 30%, 40%, or 50% of the ratio of phosphatidylethanolamine: triacylglycerol in the source cell; or has a ratio of phosphatidylserine: ceramide that is within 10%, 20%, 30%, 40%, or 50% of the ratio of phosphatidylserine: ceramide in the source cell; or has a ratio of phosphatidylserine: diacylglycerol that is within 10%, 20%, 30%, 40%, or 50% of the ratio of phosphatidylserine: diacylglycerol in the source cell; or has a ratio of phosphatidylserine: hexosylceramide that is within 10%, 20%, 30%, 40%, or 50% of the ratio of phosphatidylserine: hexosylceramide in the source cell; or has a ratio of phosphatidylserine:lysophosphatidate that is within 10%, 20%, 30%, 40%, or 50% of the ratio of phosphatidylserine: lysophosphatidate in the source cell; or has a ratio of phosphatidylserine: lyso-phosphatidylcholine that is within 10%, 20%, 30%, 40%, or 50% of the ratio of phosphatidylserine: lyso-phosphatidylcholine in the source cell; or has a ratio of phosphatidylserine: lyso-phosphatidylethanolamine that is within 10%, 20%, 30%, 40%, or 50% of the ratio of phosphatidylserine: lyso-phosphatidylethanolamine in the source cell; or has a ratio of phosphatidylserine: lyso-phosphatidylglycerol that is within 10%, 20%, 30%, 40%, or 50% of the ratio of phosphatidylserine: lyso-phosphatidylglycerol in the source cell; or has a ratio of phosphatidylserine: lyso-phosphatidylinositol that is within 10%, 20%, 30%, 40%, or 50% of the ratio of phosphatidylserine: lyso-phosphatidylinositol in the source cell; or has a ratio of phosphatidylserine: lyso-phosphatidylserine that is within 10%, 20%, 30%, 40%, or 50% of the ratio of phosphatidylserine: lyso-phosphatidylserine in the source cell; or has a ratio of phosphatidylserine: phosphatidate that is within 10%, 20%, 30%, 40%, or 50% of the ratio of phosphatidylserine: phosphatidate in the source cell; or has a ratio of phosphatidylserine: phosphatidylglycerol that is within 10%, 20%, 30%, 40%, or 50% of the ratio of phosphatidylserine: phosphatidylglycerol in the source cell; or has a ratio of phosphatidylserine: phosphatidylinositol that is within 10%, 20%, 30%, 40%, or 50% of the ratio of phosphatidylserine: phosphatidylinositol in the source cell; or has a ratio of phosphatidylserine: cholesterol ester that is within 10%, 20%, 30%, 40%, or 50% of the ratio of phosphatidylserine: cholesterol ester in the source cell; or has a ratio of phosphatidylserine: sphingomyelin that is within 10%, 20%, 30%, 40%, or 50% of the ratio of phosphatidylserine: sphingomyelin in the source cell; or has a ratio of phosphatidylserine: triacylglycerol that is within 10%, 20%, 30%, 40%, or 50% of the ratio of phosphatidylserine: triacylglycerol in the source cell; or has a ratio of sphingomyelin: ceramide that is within 10%, 20%, 30%, 40%, or 50% of the ratio of sphingomyelin: ceramide in the source cell; or has a ratio of sphingomyelin: diacylglycerol that is within 10%, 20%, 30%, 40%, or 50% of the ratio of sphingomyelin: diacylglycerol in the source cell; or has a ratio of sphingomyelin: hexosylceramide that is within 10%, 20%, 30%, 40%, or 50% of the ratio of sphingomyelin: hexosylceramide in the source cell; or has a ratio of sphingomyelin:lysophosphatidate that is within 10%, 20%, 30%, 40%, or 50% of the ratio of sphingomyelin: lysophosphatidate in the source cell; or has a ratio of sphingomyelin: lyso-phosphatidylcholine that is within 10%, 20%, 30%, 40%, or 50% of the ratio of sphingomyelin: lyso-phosphatidylcholine in the source cell; or has a ratio of sphingomyelin: lyso-phosphatidylethanolamine that is within 10%, 20%, 30%, 40%, or 50% of the ratio of sphingomyelin: lyso-phosphatidylethanolamine in the source cell; or has a ratio of sphingomyelin: lyso-phosphatidylglycerol that is within 10%, 20%, 30%, 40%, or 50% of the ratio of sphingomyelin: lyso-phosphatidylglycerol in the source cell; or has a ratio of sphingomyelin: lyso-phosphatidylinositol that is within 10%, 20%, 30%, 40%, or 50% of the ratio of sphingomyelin: lyso-phosphatidylinositol in the source cell; or has a ratio of sphingomyelin: lyso-phosphatidylserine that is within 10%, 20%, 30%, 40%, or 50% of the ratio of sphingomyelin: lyso-phosphatidylserine in the source cell; or has a ratio of sphingomyelin: phosphatidate that is within 10%, 20%, 30%, 40%, or 50% of the ratio of sphingomyelin: phosphatidate in the source cell; or has a ratio of sphingomyelin: phosphatidylglycerol that is within 10%, 20%, 30%, 40%, or 50% of the ratio of sphingomyelin: phosphatidylglycerol in the source cell; or has a ratio of sphingomyelin: phosphatidylinositol that is within 10%, 20%, 30%, 40%, or 50% of the ratio of sphingomyelin: phosphatidylinositol in the source cell; or has a ratio of sphingomyelin: cholesterol ester that is within 10%, 20%, 30%, 40%, or 50% of the ratio of sphingomyelin: cholesterol ester in the source cell; or has a ratio of sphingomyelin: triacylglycerol that is within 10%, 20%, 30%, 40%, or 50% of the ratio of sphingomyelin: triacylglycerol in the source cell; or has a ratio of cholesterol ester: ceramide that is within 10%, 20%, 30%, 40%, or 50% of the ratio of cholesterol ester: ceramide in the source cell; or has a ratio of cholesterol ester: diacylglycerol that is within 10%, 20%, 30%, 40%, or 50% of the ratio of cholesterol ester: diacylglycerol in the source cell; or has a ratio of cholesterol ester: hexosylceramide that is within 10%, 20%, 30%, 40%, or 50% of the ratio of cholesterol ester: hexosylceramide in the source cell; or has a ratio of cholesterol ester:lysophosphatidate that is within 10%, 20%, 30%, 40%, or 50% of the ratio of cholesterol ester: lysophosphatidate in the source cell; or has a ratio of cholesterol ester: lyso-phosphatidylcholine that is within 10%, 20%, 30%, 40%, or 50% of the ratio of cholesterol ester: lyso-phosphatidylcholine in the source cell; or has a ratio of cholesterol ester: lyso-phosphatidylethanolamine that is within 10%, 20%, 30%, 40%, or 50% of the ratio of cholesterol ester: lyso-phosphatidylethanolamine in the source cell; or has a ratio of cholesterol ester: lyso-phosphatidylglycerol that is within 10%, 20%, 30%, 40%, or 50% of the ratio of cholesterol ester: lyso-phosphatidylglycerol in the source cell; or has a ratio of cholesterol ester: lyso-phosphatidylinositol that is within 10%, 20%, 30%, 40%, or 50% of the ratio of cholesterol ester: lyso-phosphatidylinositol in the source cell; or has a ratio of cholesterol ester: lyso-phosphatidylserine that is within 10%, 20%, 30%, 40%, or 50% of the ratio of cholesterol ester: lyso-phosphatidylserine in the source cell; or has a ratio of cholesterol ester: phosphatidate that is within 10%, 20%, 30%, 40%, or 50% of the ratio of cholesterol ester: phosphatidate in the source cell; or has a ratio of cholesterol ester: phosphatidylglycerol that is within 10%, 20%, 30%, 40%, or 50% of the ratio of cholesterol ester: phosphatidylglycerol in the source cell; or has a ratio of cholesterol ester: phosphatidylinositol that is within 10%, 20%, 30%, 40%, or 50% of the ratio of cholesterol ester: phosphatidylinositol in the source cell; or has a ratio of cholesterol ester: triacylglycerol that is within 10%, 20%, 30%, 40%, or 50% of the ratio of cholesterol ester: triacylglycerol in the source cell.

[0760] In some embodiments, the fusosome comprises a proteomic composition similar to that of the source cell, e.g., using an assay of Example 87. In some embodiments, the protein composition of fusosomes are similar to the parental cells from which they are derived. In some embodiments, the fractional content of each of a plurality of categories of proteins is determined as the sum of intensity signals from each category divided by the sum of the intensity signals of all identified proteins in the sample, e.g., as described in Example 87. In some embodiments, the fusosome comprises (or is identified as comprising) varying amounts of compartment-specific proteins relative to parental cells and/or exosomes, e.g., as determined according to the method described in Example 97. In some embodiments, fusosomes are (or are identified as being) depleted with endoplasmic reticulum protein compared to parental cells and exosomes. In some embodiments, fusosomes are (or are identified as being) depleted for exosomal protein compared to exosomes. In some embodiments, fusosomes have (or are identified as having) less than 15%, 20%, or 25% of the protein in the fusosome as being exosomal protein. In some embodiments, fusosomes are (or are identified as being) depleted for mitochondrial protein compared to parental cells. In some embodiments, fusosomes are (or are identified as being)enriched for nuclear protein compared to parental cells. In some embodiments, fusosomes are (or are identified as being) enriched for ribosomal proteins compared to parental cells and exosomes. In some embodiments, at least 0.025%, 0.03%, 0.04%, 0.05%, 0.06%, 0.07%, 0.08%, 0.09%, 0.1%, 1%, 2%, 3%, 4%, 5%, 6%, 7% 8%, 9% or 10% of the protein in the fusosome is ribosomal protein, or about 0.025-0.2%, 0.05-0.15%, 0.06-1.4%, 0.07%-1.3%, 0.08%-1.2%, 0.09%-1.1%, 1%-20%, 3%-15%, 5%-12.5%, 7.5%-11%, or 8.5%-10.5%, or 9%-10% of the protein in the fusosome is ribosomal protein.

[0761] In some embodiments, the fusosome comprises a ratio of lipids to proteins that is within 10%, 20%, 30%, 40%, or 50% of the corresponding ratio in the source cell, e.g., as measured using an assay of Example 40. In embodiments, the fusosome comprises (or is identified as comprising) a ratio of lipid mass to proteins approximately equal to the lipid mass to protein ratio for nucleated cells. In embodiments, the fusosome comprises (or is identified as comprising) a greater lipid:protein ratio than the parental cell. In embodiments, the fusosome comprises (or is identified as comprising) a lipid:protein ratio of about 110%, 115%, 120%, 125%, 130%, 131%, 132%, 132.5%, 133%, 134%, 135%, 140%, 145%, or 150% of the lipid:protein ratio of the parental cell. In some embodiments, the fusosome or fusosome composition has (or is identified as having) a phospholipid:protein ratio of about 100-180, 110-170, 120-160, 130-150, 135-145, 140-142, or 141 μmol/g, e.g., in an assay of Example 83. In some embodiments, the fusosome or fusosome composition has (or is identified as having) a phospholipid:protein ratio that is about 60-90%, 70-80%, or 75% of the corresponding ratio in the source cells, e.g., in an assay of Example 83.

[0762] In some embodiments, the fusosome comprises a ratio of proteins to nucleic acids (e.g., DNA or RNA) that is within 10%, 20%, 30%, 40%, or 50% of the corresponding ratio in the source cell, e.g., as measured using an assay of Example 41. In embodiments, the fusosome comprises (or is identified as comprising) a ratio of protein mass to DNA mass similar to that of a parental cell. In embodiments, the fusosome comprises (or is identified as comprising) a ratio of protein:DNA that is about about 85%, 90%, 95%, 96%, 97%, 98%, 98.2%, 99%, 100%, 101%, 102%, 103%, 104%, 105%, or 110% of the parental cell. In some embodiments, the fusosome comprises a ratio of proteins to DNA that is greater than the corresponding ratio in the source cell, e.g., at least 10%, 20%, 30%, 40%, 50%, 60%, 70%, 80%, or 90% greater, e.g., as measured using an assay of Example 41. In some embodiments, the fusosome or fusosome composition comprises (or is identified as comprising) a ratio of protein:DNA that is about 20-35, 25-30, 26-29, 27-28, or 27.8 g/g, e.g., by an assay of Example 84. In some embodiments, the fusosome or fusosome composition comprises (or is identified as comprising) a ratio of protein:DNA that is within about 1%, 2%, 5%, 10%, or 20% of the corresponding ratio in the source cells, e.g., by an assay of Example 84.

[0763] In some embodiments, the fusosome comprises a ratio of lipids to nucleic acids (e.g., DNA) that is within 10%, 20%, 30%, 40%, or 50% of the corresponding ratio in the source cell, e.g., as measured using an assay of Example 91. In some embodiments, the fusosome or fusosome composition comprises (or is identified as comprising) a ratio of lipids:DNA that is about 2.0-6.0, 3.0-5.0, 3.5-4.5, 3.8-4.0, or 3.92 μmol/mg, e.g., by an assay of Example 85. In some embodiments, the fusosome comprises a ratio of lipids to nucleic acids (e.g., DNA) that is greater than the corresponding ratio in the source cell, e.g., at least 10%, 20%, 30%, 40%, 50%, 60%, 70%, 80%, or 90% greater, e.g., as measured using an assay of Example 91. In embodiments, the fusosome comprises (or is identified as comprising) a greater lipid:DNA ratio than the parental cell. In embodiments, the fusosome comprises about a 105%, 110%, 115%, 120%, 125%, 130%, 135%, 140%, 145%, 150%, or greater lipid:DNA ratio compared to the parental cell.

[0764] In some embodiments, the fusosome composition has a half-life in a subject, e.g., in a mouse, that is within 1%, 2%, 3%, 4%, 5%, 10%, 20%, 30%, 40%, 50%, 60%, 70%, 80%, 90%, 100% of the half life of a reference cell composition, e.g., the source cell, e.g., by an assay of Example 60. In some embodiments, the fusosome composition has a half-life in a subject, e.g., in a mouse, that is at least 1 hour, 2 hours, 3 hours, 4 hours, 5 hours, 6 hours, 12 hours, or 24 hours, e.g., in a human subject or in a mouse, e.g., by an assay of Example 60. In embodiments, the fusosome composition has a half-life of at least 1, 2, 4, 6, 12, or 24 hours in a subject, e.g., in an assay of Example 79. In some embodiments, the therapeutic agent has a half-life in a subject that is longer than the half-life of the fusosome composition, e.g., by at least 10%, 20%, 50%, 2-fold, 5-fold, or 10-fold. For instance, the fusosome may deliver the therapeutic agent to the target cell, and the therapeutic agent may be present after the fusosome is no longer present or detectable.

[0765] In some embodiments, the fusosome transports glucose (e.g., labeled glucose, e.g., 2-NBDG) across a membrane, e.g., by at least 1%, 2%, 3%, 4%, 5%, 10%, 20%, 30%, 40%, 50%, 60%, 70%, 80%, 90%, 100% more than a negative control, e.g., an otherwise similar fusosome in the absence of glucose, e.g., as measured using an assay of Example 50. In some embodiments, the fusosome transports (or is identified as transporting) glucose (e.g., labeled glucose, e.g., 2-NBDG) across a membrane at a greater level than otherwise similar fusosomes treated with phloretin, e.g., in an assay of Example 72. In embodiments, a fusosome not treated with phloretin transports (or is identified as not transporting) glucose at a level at least 1%, 2%, 3%, 5%, or 10% higher (and optionally up to 15% higher) than an otherwise similar fusosome treated with phloretin, e.g., in an assay of Example 72. In some embodiments, the fusosome comprises esterase activity in the lumen that is within 1%, 2%, 3%, 4%, 5%, 10%, 20%, 30%, 40%, 50%, 60%, 70%, 80%, 90%, or 100% of that of the esterase activity in a reference cell, e.g., the source cell or a mouse embryonic fibroblast, e.g., using an assay of Example 51. In some embodiments, the fusosome comprises (or is identified as comprising) esterase activity in the lumen that is at least 10-fold, 20-fold, 50-fold, 100-fold, 200-fold, 500-fold, 1000-fold, 2000-fold, or 5000-fold higher than an unstained control, e.g., by an assay of Example 73. In some embodiments, the fusosome comprises (or is identified as comprising) esterase activity in the lumen that is about 10-100-fold lower than that of the source cells, e.g., by an assay of Example 73. In some embodiments, the fusosome comprises (or is identified as comprising) an acetylcholinesterase activity of about 1E5-1E6, 6E5-8E5, 6.5E5-7E5, or 6.83E5 exosome equivalents, e.g., by an assay of Example 74. In some embodiments, the fusosome comprises a metabolic activity level (e.g., citrate synthase activity) that is within 1%, 2%, 3%, 4%, 5%, 10%, 20%, 30%, 40%, 50%, 60%, 70%, 80%, 90%, or 100% of the metabolic activity level in a reference cell, e.g., the source cell, e.g., as described in Example 53. In some embodiments, the fusosome comprises a metabolic activity level (e.g., citrate synthase activity) that is at least 1%, 2%, 3%, 4%, 5%, 10%, 20%, 30%, 40%, 50%, 60%, 70%, 80%, 90%, or 100% of the metabolic activity level in a reference cell, e.g., the source cell, e.g., as described in Example 53. In some embodiments, the fusosome comprises (or is identified as comprising) a citrate synthase activity that is about 1E−2-2 E−2, 1.3E−2-1.8E−2, 1.4E−2-1.7E−2, 1.5E−2-1.6E−2, or 1.57E−2 umol/ug fusosome/min, e.g., by an assay of Example 75. In some embodiments, the fusosome comprises a respiration level (e.g., oxygen consumption rate), e.g., basal, uncoupled, or maximal respiration level, that is within 1%, 2%, 3%, 4%, 5%, 10%, 20%, 30%, 40%, 50%, 60%, 70%, 80%, 90%, or 100% of the respiration level in a reference cell, e.g., the source cell, e.g., as described in Example 54. In some embodiments, the fusosome comprises a respiration level (e.g., oxygen consumption rate), e.g., basal, uncoupled, or maximal respiration level, that is at least 1%, 2%, 3%, 4%, 5%, 10%, 20%, 30%, 40%, 50%, 60%, 70%, 80%, 90%, or 100% of the respiration level in a reference cell, e.g., the source cell, e.g., as described in Example 54. In embodiments, the fusosome comprises (or is identified as comprising) a basal respiration rate of about 8-15, 9-14, 10-13, 11-12, or 11.3 pmol/min/20 μg fusosome, e.g., by an assay of Example 76. In embodiments, the fusosome comprises (or is identified as comprising) an uncoupled respiration rate of about 8-13, 9-12, 10-11, 10-10.2, or 10.1 pmol/min/20 μg fusosome, e.g., by an assay of Example 76. In embodiments, the fusosome comprises (or is identified as comprising) a maximal respiration rate of about 15-25, 16-24, 17-23, 18-22, 19-21, or 20 pmol/min/20 μg fusosome, e.g., by an assay of Example 76. In embodiments, the fusosome has (or is identified as having) a higher basal respiration rate than uncoupled respiration rate, e.g., by about 1%, 2%, 5%, or 10%, e.g., up to about 15%, e.g., by an assay of Example 76. In embodiments, the fusosome has (or is identified as having) a higher maximal respiration rate than basal respiration rate, e.g., by about 1%, 2%, 5%, 10%, 20%, 30%, 40%, 50%, 60%, 70%, 80%, or 90%, e.g., by an assay of Example 76. In some embodiments, the fusosome comprises an Annexin-V staining level of at most 18,000, 17,000, 16,000, 15,000, 14,000, 13,000, 12,000, 11,000, or 10,000 MFI, e.g., using an assay of Example 55, or wherein the fusosome comprises an Annexin-V staining level at least 5%, 10%, 20%, 30%, 40%, 50%, 60%, 70%, 80%, or 90% lower than the Annexin-V staining level of an otherwise similar fusosome treated with menadione in the assay of Example 55, or wherein the fusosome comprises an Annexin-V staining level at least 5%, 10%, 20%, 30%, 40%, 50%, 60%, 70%, 80%, or 90% lower than the Annexin-V staining level of a macrophage treated with menadione in the assay of Example 55. In embodiments, the fusosome comprises (or is identified as comprising) an Annexin V-staining level that is at least about 1%, 2%, 5%, or 10% lower than the Annexin V-staining level of an otherwise similar fusosome treated with antimycin A, e.g., in an assay of Example77. In embodiments, the fusosome comprises (or is identified as comprising) an Annexin V-staining level that is within about 1%, 2%, 5%, or 10% of the Annexin V-staining level of an otherwise similar fusosome treated with antimycin A, e.g., in an assay of Example 77.

[0766] In some embodiments, the fusosome has a miRNA content level of at least at least 1%, 2%, 3%, 4%, 5%, 10%, 20%, 30%, 40%, 50%, 60%, 70%, 80%, 90%, or greater than that of the source cell, e.g., by an assay of Example 33. In some embodiments, the fusosome has a miRNA content level of at least 1%, 2%, 3%, 4%, 5%, 10%, 20%, 30%, 40%, 50%, 60%, 70%, 80%, 90%, or greater of the miRNA content level of the source cell (e.g., up to 100% of the miRNA content level of the source cell), e.g., by an assay of Example 33. In some embodiments, the fusosome has a total RNA content level of at least 1%, 2%, 3%, 4%, 5%, 10%, 20%, 30%, 40%, 50%, 60%, 70%, 80%, 90%, or greater of the total RNA content level of the source cell (e.g., up to 100% of the total RNA content level of the source cell), e.g., as measured by an assay of Example 66.

[0767] In some embodiments, the fusosome has a soluble: non-soluble protein ratio is within 1%, 2%, 3%, 4%, 5%, 10%, 20%, 30%, 40%, 50%, 60%, 70%, 80%, 90%, or greater than that of the source cell, e.g., within 1%-2%, 2%-3%, 3%-4%, 4%-5%, 5%-10%, 10%-20%, 20%-30%, 30%-40%, 40%-50%, 50%-60%, 60%-70%, 70%-80%, or 80%-90% of that of the source cell, e.g., by an assay of Example 38. In embodiments, the fusosome has a soluble: non-soluble protein ratio of about 0.3-0.8, 0.4-0.7, or 0.5-0.6, e.g., about 0.563, e.g., by an assay of Example 38. In some embodiments, the population of fusosomes has (or is identified as having) a soluble:insoluble protein mass ratio of about 0.3-0.8, 0.4-0.7, 0.5-0.6, or 0.563, or greater than about 0.1, 0.2, 0.3, 0.4, or 0.5. In some embodiments, the population of fusosomes has (or is identified as having) a soluble:insoluble protein mass ratio that is greater than that of the source cells, e.g., at least 2-fold, 3-fold, 4-fold, 5-fold, 10-fold, or 20-fold higher. In embodiments, the soluble:insoluble protein mass ratio is determined by an assay of Example 70. In embodiments, the soluble: insoluble protein mass ratio is (or is identified as being) lower in the fusosome population than in the parental cells. In embodiments, when the ratio of fusosomes to parental cells is (or is identified as being) about 3%, 4%, 5%, 6%, 7%, or 8%, the soluble: insoluble ratio of the population of fusosomes is (or is identified as being) about equal to the soluble: insoluble ratio of the parental cells.

[0768] In some embodiments, the fusosome has an LPS level less than 5%, 1%, 0.5%, 0.01%, 0.005%, 0.0001%, 0.00001% or less of the LPS content of the source cell, e.g., as measured by mass spectrometry, e.g., in an assay of Example 39. In some embodiments, the fusosome is capable of signal transduction, e.g., transmitting an extracellular signal, e.g., AKT phosphorylation in response to insulin, or glucose (e.g., labeled glucose, e.g., 2-NBDG) uptake in response to insulin, e.g., by at least 1%, 2%, 3%, 4%, 5%, 10%, 20%, 30%, 40%, 50%, 60%, 70%, 80%, 90%, 100% more than a negative control, e.g., an otherwise similar fusosome in the absence of insulin, e.g., using an assay of Example 49. In some embodiments, the fusosome targets a tissue, e.g., liver, lungs, heart, spleen, pancreas, gastrointestinal tract, kidney, testes, ovaries, brain, reproductive organs, central nervous system, peripheral nervous system, skeletal muscle, endothelium, inner ear, or eye, when administered to a subject, e.g., a mouse, e.g., wherein at least 0.1%, 0.5%, 1%, 1.5%, 2%, 2.5%, 3%, 4%, 5%, 10%, 15%, 20%, 25%, 30%, 35%, 40%, 50%, 60%, 70%, 80%, or 90% of the fusosomes in a population of administered fusosomes are present in the target tissue after 24, 48, or 72 hours, e.g., by an assay of Example 64. In some embodiments, the fusosome has a juxtacrine-signaling level of at least 1%, 2%, 3%, 4%, 5%, 10%, 20%, 30%, 40%, 50%, 60%, 70%, 80%, 90%, or 100% greater than the level of juxtacrine signaling induced by a reference cell, e.g., the source cell or a bone marrow stromal cell (BMSC), e.g., by an assay of Example 56. In some embodiments, the fusosome has a juxtacrine-signaling level of at least 1%, 2%, 3%, 4%, 5%, 10%, 20%, 30%, 40%, 50%, 60%, 70%, 80%, or 90% (e.g., up to 100%) of the level of juxtacrine signaling induced by a reference cell, e.g., the source cell or a bone marrow stromal cell (BMSC), e.g., by an assay of Example56. In some embodiments, the fusosome has a paracrine-signaling level of at least 1%, 2%, 3%, 4%, 5%, 10%, 20%, 30%, 40%, 50%, 60%, 70%, 80%, 90%, 100% greater than the level of paracrine signaling induced by a reference cell, e.g., the source cell or a macrophage, e.g., by an assay of Example 57. In some embodiments, the fusosome has a paracrine-signaling level of at least 1%, 2%, 3%, 4%, 5%, 10%, 20%, 30%, 40%, 50%, 60%, 70%, 80%, or 90% (e.g., up to 100%) of the level of paracrine signaling induced by a reference cell, e.g., the source cell or a macrophage, e.g., by an assay of Example 57. In some embodiments, the fusosome polymerizes actin at a level within 1%, 2%, 3%, 4%, 5%, 10%, 20%, 30%, 40%, 50%, 60%, 70%, 80%, 90%, or 100% compared to the level of polymerized actin in a reference cell, e.g., the source cell or a C2C12 cell, e.g., by the assay of Example 58. In some embodiments, the fusosome polymerizes actin (or is identified as polymerizing actin) at a level that is constant over time, e.g, over at least 3, 5, or 24 hours, e.g., by an assay of Example 81. In embodiments, the level of actin polymerization changes by less than 1%, 2%, 5%, 10%, or 20% over a 5-hour period, e.g. by the assay of Example 81. In some embodiments, the fusosome has a membrane potential within about 1%, 2%, 3%, 4%, 5%, 10%, 20%, 30%, 40%, 50%, 60%, 70%, 80%, 90%, 100% of the membrane potential of a reference cell, e.g., the source cell or a C2C12 cell, e.g., by an assay of Example 59, or wherein the fusosome has a membrane potential of about −20 to −150 mV, −20 to −50 mV, −50 to −100 mV, or −100 to −150 mV, or wherein the fusosome has a membrane potential of less than −1 mv, −5 mv, −10 mv, −20 mv, −30 mv, −40 mv, −50 mv, −60 mv, −70 mv, −80 mv, −90 mv, −100 mv. In some embodiments, the fusosome has (or is identified as having) a membrane potential of about −25 to −35, −27 to −32, −28 to −31, −29 to −30, or −29.6 millivolts, e.g., in an assay of Example 78. In some embodiments, the fusosome is capable of extravasation from blood vessels, e.g., at a rate at least 1%, 2%, 5%, 10%, 20%, 30%, 40%, 50%, 60%, 70%, 80%, or 90% the rate of extravasation of the source cell, e.g., using an assay of Example 44, e.g., wherein the source cell is a neutrophil, lymphocyte, B cell, macrophage, or NK cell. In some embodiments, the fusosome is capable of chemotaxis, e.g., of at least 1%, 2%, 3%, 4%, 5%, 10%, 20%, 30%, 40%, 50%, 60%, 70%, 80%, or 90% (e.g., up to 100%) compared to a reference cell, e.g., a macrophage, e.g., using an assay of Example 45. In some embodiments, the fusosome is capable of phagocytosis, e.g., at least 1%, 2%, 3%, 4%, 5%, 10%, 20%, 30%, 40%, 50%, 60%, 70%, 80%, or 90% (e.g., up to 100%) compared to a reference cell, e.g., a macrophage, e.g., using an assay of Example 47. In some embodiments, the fusosome is capable of crossing a cell membrane, e.g., an endothelial cell membrane or the blood brain barrier. In some embodiments, the fusosome is capable of secreting a protein, e.g., at a rate at least 1%, 2%, 3%, 4%, 5%, 10%, 20%, 30%, 40%, 50%, 60%, 70%, 80%, 90%, or 100% greater than a reference cell, e.g., a mouse embryonic fibroblast, e.g., using an assay of Example 48. In some embodiments, the fusosome is capable of secreting a protein, e.g., at a rate at least 1%, 2%, 3%, 4%, 5%, 10%, 20%, 30%, 40%, 50%, 60%, 70%, 80%, or 90% (e.g., up to 100%) compared to a reference cell, e.g., a mouse embryonic fibroblast, e.g., using an assay of Example 48.

[0769] In some embodiments, the fusosome is not capable of transcription or has transcriptional activity of less than 1%, 2.5% 5%, 10%, 20%, 30%, 40%, 50%, 60%, 70%, 80%, or 90% of that of the transcriptional activity of a reference cell, e.g., the source cell, e.g., using an assay of Example 24. In some embodiments, the fusosome is not capable of nuclear DNA replication or has nuclear DNA replication of less than 1%, 2.5% 5%, 10%, 20%, 30%, 40%, 50%, 60%, 70%, 80%, or 90% of the nuclear DNA replication of a reference cell, e.g., the source cell, e.g., using an assay of Example 25. In some embodiments, the fusosome lacks chromatin or has a chromatin content of less than 1%, 2.5% 5%, 10%, 20%, 30%, 40%, 50%, 60%, 70%, 80%, or 90% of the of the chromatin content of a reference cell, e.g., the source cell, e.g., using an assay of Example 32.

[0770] In some embodiments, a characteristic of a fusosome is described by comparison to a reference cell. In embodiments, the reference cell is the source cell. In embodiments, the reference cell is a HeLa, HEK293, HFF-1, MRC-5, WI-38, IMR 90, IMR 91, PER.C6, HT-1080, or BJ cell. In some embodiments, a characteristic of a population of fusosomes is described by comparison to a population of reference cells, e.g., a population of source cells, or a population of HeLa, HEK293, HFF-1, MRC-5, WI-38, IMR 90, IMR 91, PER.C6, HT-1080, or BJ cells.

[0771] In some embodiments, the fusosome meets a pharmaceutical or good manufacturing practices (GMP) standard. In some embodiments, the fusosome was made according to good manufacturing practices (GMP). In some embodiments, the fusosome has a pathogen level below a predetermined reference value, e.g., is substantially free of pathogens. In some embodiments, the fusosome has a contaminant level below a predetermined reference value, e.g., is substantially free of contaminants. In some embodiments, the fusosome has low immunogenicity, e.g., as described herein.

[0772] In some embodiments, immunogenicity of a fusosome composition is assayed by a serum inactivation assay (e.g., an assay that detects antibody-mediated neutralization or complement mediated degradation). In some embodiments, fusosomes are not inactivated by serum, or are inactivated at a level below a predetermined value. In some embodiments, serum of a fusosome-naïve subject (e.g., human or mouse) is contacted with a test fusosome composition. In some embodiments, the serum of a subject that has received one or more administrations of fusosomes, e.g., has received at least two administrations of fusosomes, is contacted with the test fusosome composition. In embodiments, serum-exposed fusosomes are then tested for ability to deliver a cargo to target cells. In some embodiments, the percent of cells that detectably comprise the cargo after treatment with serum-incubated fusosomes is at least 50%, 60%, 70%, 80%, 90%, or 95% the percent of cells that detectably comprise the cargo after treatment with positive control fusosomes not contacted with serum. In some embodiments, serum inactivation is measured using an assay of Example 99.

[0773] In some embodiments, immunogenicity of a fusosome composition is assayed by detecting complement activation in response to the fusosomes. In some embodiments, the fusosomes do not activate complement, or activate complement at a level below a predetermined value. In some embodiments, serum of a fusosome-naive subject (e.g., human or mouse) is contacted with a test fusosome composition. In some embodiments, the serum of a subject that has received one or more administrations of fusosomes, e.g., has received at least two administrations of fusosomes, is contacted with the test fusosome composition. In embodiments, the composition comprising serum and fusosomes is then tested for an activated complement factor (e.g., C3a), e.g., by ELISA. In some embodiments, a fusosome comprising a modification described herein (e.g., elevated levels of a complement regulatory protein compared to a reference cell) undergoes reduced complement activation compared to an otherwise similar fusosome that lacks the modification, e.g., reduced by at least 5%, 10%, 20%, 30%, 40%, 50%, 60%, 70%, 80%, 90%, 95%, 98%, or 99%. In some embodiments, complement activation is measured using an assay of Example 100.

[0774] In some embodiments, a fusosome or population of fusosomes will not be substantially inactivated by serum. In some embodiments, a fusosome or population of fusosomes is resistant to serum inactivation, e.g., as quantified according to the method described in Example 99. In embodiments, the fusosome or population of fusosomes is not substantially inactivated by serum or is resistant to serum inactivation following multiple administrations of the fusosome or population of fusosomes to a subject, e.g., according to the methods described herein. In some embodiments, a fusosome is modified to have a reduced serum inactivation, e.g., compared to a corresponding unmodified fusosome, e.g., following multiple administrations of the modified fusosome, e.g., as quantified according to the method described in Example 99.

[0775] In some embodiments, a fusosome does not substantially induce complement activity, e.g., as measured according to the method described in Example 100. In some embodiments, a fusosome is modified to induce reduced complement activity compared to a corresponding unmodified fusosome. In embodiments, complement activity is measured by determining expression or activity of a complement protein (e.g., DAF, proteins that bind decay-accelerating factor (DAF, CD55), e.g., factor H (FH)-like protein-1 (FHL-1), C4b-binding protein (C4BP), complement receptor 1 (CD35), Membrane cofactor protein (MCP, CD46), Profectin (CD59), proteins that inhibit the classical and alternative complement pathway CD/C5 convertase enzymes, or proteins that regulate MAC assembly) in a cell

[0776] In some embodiments, the source cell is an endothelial cell, a fibroblast, a blood cell (e.g., a macrophage, a neutrophil, a granulocyte, a leukocyte), a stem cell (e.g., a mesenchymal stem cell, an umbilical cord stem cell, bone marrow stem cell, a hematopoietic stem cell, an induced pluripotent stem cell e.g., an induced pluripotent stem cell derived from a subject's cells), an embryonic stem cell (e.g., a stem cell from embryonic yolk sac, placenta, umbilical cord, fetal skin, adolescent skin, blood, bone marrow, adipose tissue, erythropoietic tissue, hematopoietic tissue), a myoblast, a parenchymal cell (e.g., hepatocyte), an alveolar cell, a neuron (e.g., a retinal neuronal cell) a precursor cell (e.g., a retinal precursor cell, a myeloblast, myeloid precursor cells, a thymocyte, a meiocyte, a megakaryoblast, a promegakaryoblast, a melanoblast, a lymphoblast, a bone marrow precursor cell, a normoblast, or an angioblast), a progenitor cell (e.g., a cardiac progenitor cell, a satellite cell, a radial glial cell, a bone marrow stromal cell, a pancreatic progenitor cell, an endothelial progenitor cell, a blast cell), or an immortalized cell (e.g., HeLa, HEK293, HFF-1, MRC-5, WI-38, IMR 90, IMR 91, PER.C6, HT-1080, or BJ cell). In some embodiments, the source cell is other than a 293 cell, HEK cell, human endothelial cell, or a human epithelial cell, monocyte, macrophage, dendritic cell, or stem cell.

[0777] In some embodiments, the source cell expresses (e.g., overexpresses) ARRDC1 or an active fragment or variant thereof. In some embodiments, the fusosome or fusosome composition has a ratio of fusogen to ARRDC1 of about 1-3, 1-10, 1-100, 3-10, 4-9, 5-8, 6-7, 15-100, 60-200, 80-180, 100-160, 120-140, 3-100, 4-100, 5-100, 6-100, 15-100, 80-100, 3-200, 4-200, 5-200, 6-200, 15-200, 80-200, 100-200, 120-200, 300-1000, 400-900, 500-800, 600-700, 640-690, 650-680, 660-670, 100-10,000, or about 664.9, e.g., by a mass spectrometry assay. In some embodiments, the level of ARRDC1 as a percentage of total protein content is at least about 0.01%, 0.02%, 0.03%, 0.04%, 0.05%; 0.1%, 0.15%, 0.2%, 0.25%; 0.5%, 1%, 2%, 3%, 4%, 5%; or the level of ARRDC1 as a percentage of total protein content is about 0.05-1.5%, 0.1%-0.3%, 0.05-0.2%, 0.1-0.2%, 0.25-7.5%, 0.5%-1.5%, 0.25-1%, 0.5-1%, 0.05-1.5%, 10%-30%, 5-20%, or 10-20%, e.g., by mass spectrometry, e.g., as measured according to the method described in Example 98. In some embodiments, the fusosome or fusosome composition has a ratio of fusogen to TSG101 of about 100-1,000, 100-400, 100-500, 200-400, 200-500, 200-1,000, 300-400, 1,000-10,000, 2,000-5,000, 3,000-4,000, 3,050-3,100, 3,060-3,070, or about 3,064, 10,000-100,000, 10,000-200,000, 10,000-500,000, 20,000-500,000, 30,000-400,000, e.g., using a mass spectrometry assay, e.g., an assay of Example 94. In some embodiments, the fusosome or fusosome composition has a ratio of cargo to tsg101 of about 1-3, 1-30, 1-20, 1-25, 1.5-30, 10-30, 15-25, 18-21, 19-20, 10-300, 10-200, 15-300, 15-200, 100-300, 100-200, 150-300, or about 19.5, e.g., using a mass spectrometry assay, e.g., an assay of Example 95. In some embodiments, the level of TSG101 as a percentage of total protein content is at least about 0.0001%, 0.0002%, 0.0003%, 0.0004%, 0.0005%, 0.0006%, 0.0007%, 0.001%, 0.002%, 0.003%, 0.004%, 0.005%, 0.006%, 0.007%; 0.01%, 0.02%, 0.03%, 0.04%, 0.05%, 0.06%, 0.07%; or the level of TSG101 as a percentage of total protein content is about 0.0001-0.001, 0.0001-0.002, 0.0001-0.01, 0.0001-0.1, 0.001-0.01, 0.002-0.006, 0.003-0.005, 0.001-0.1, 0.01-0.1, 0.02-0.06, 0.03-0.05, or 0.004, e.g., by mass spectrometry, e.g., as measured according to the method described in Example 98.

[0778] In some embodiments, the fusosome comprises a cargo, e.g., a therapeutic agent, e.g., an endogenous therapeutic agent or an exogenous therapeutic agent. In some embodiments, the therapeutic agent is chosen from one or more of a protein, e.g., an enzyme, a transmembrane protein, a receptor, an antibody; a nucleic acid, e.g., DNA, a chromosome (e.g. a human artificial chromosome), RNA, mRNA, siRNA, miRNA, or a small molecule. In some embodiments, the therapeutic agent is an organelle other than a mitochondrion, e.g., an organelle selected from: nucleus, Golgi apparatus, lysosome, endoplasmic reticulum, vacuole, endosome, acrosome, autophagosome, centriole, glycosome, glyoxysome, hydrogenosome, melanosome, mitosome, cnidocyst, peroxisome, proteasome, vesicle, and stress granule. In some embodiments, the organelle is a mitochondrion.

[0779] In some embodiments, the fusosome enters the target cell by endocytosis, e.g., wherein the level of therapeutic agent delivered via an endocytic pathway is 0.01-0.6, 0.01-0.1, 0.1-0.3, or 0.3-0.6, or at least 1%, 2%, 3%, 4%, 5%, 10%, 20%, 30%, 40%, 50%, 60%, 70%, 80%, 90% or greater than a chloroquine treated reference cell contacted with similar fusosomes, e.g., using an assay of Example 62. In some embodiments, at least 1%, 2%, 3%, 4%, 5%, 10%, 20%, 30%, 40%, 50%, 60%, 70%, 80%, 90% of fusosomes in a fusosome composition that enter a target cell enter via a non-endocytic pathway, e.g., the fusosomes enter the target cell via fusion with the cell surface. In some embodiments, the level of a therapeutic agent delivered via a non-endocytic pathway

[0780] for a given fusosome is 0.1-0.95, 0.1-0.2, 0.2-0.3, 0.3-0.4, 0.4-0.5, 0.5-0.6, 0.6-0.7, 0.7-0.8, 0.8-0.9, 0.9-0.95, or at least at least 1%, 2%, 3%, 4%, 5%, 10%, 20%, 30%, 40%, 50%, 60%, 70%, 80%, 90% or greater than a chloroquine treated reference cell, e.g., using an assay of Example 61. In some embodiments, at least 1%, 2%, 3%, 4%, 5%, 10%, 20%, 30%, 40%, 50%, 60%, 70%, 80%, 90% of fusosomes in a fusosome composition that enter a target cell enter the cytoplasm (e.g., do not enter an endosome or lysosome). In some embodiments, less than 90%, 80%, 70%, 60%, 50%, 40%, 30%, 20%, 10%, 5%, 4%, 3%, 2%, or 1% of fusosomes in a fusosome composition that enter a target cell enter an endosome or lysosome. In some embodiments, the fusosome enters the target cell by a non-endocytic pathway, e.g., wherein the level of therapeutic agent delivered is at least 90%, 95%, 98%, or 99% that of a chloroquine treated reference cell, e.g., using an assay of Example 62. In an embodiment, a fusosome delivers an agent to a target cell via a dynamin mediated pathway. In an embodiment, the level of agent delivered via a dynamin mediated pathway is in the range of 0.01-0.6, or at least 1%, 2%, 3%, 4%, 5%, 10%, 20%, 30%, 40%, 50%, 60%, 70%, 80%, 90% or greater than Dynasore treated target cells contacted with similar fusosomes, e.g., as measured in an assay of Example 63. In an embodiment, a fusosome delivers an agent to a target cell via macropinocytosis. In an embodiment, the level of agent delivered via macropinocytosis is in the range of 0.01-0.6, or at least 1%, 2%, 3%, 4%, 5%, 10%, 20%, 30%, 40%, 50%, 60%, 70%, 80%, 90% or greater than EIPA treated target cells contacted with similar fusosomes, e.g., as measured in an assay of Example 63. In an embodiment, a fusosome delivers an agent to a target cell via an actin-mediated pathway. In an embodiment, the level of agent delivered via an actin-mediated pathway will be in the range of 0.01-0.6, or at least 1%, 2%, 3%, 4%, 5%, 10%, 20%, 30%, 40%, 50%, 60%, 70%, 80%, 90% or greater than Latrunculin B treated target cells contacted with similar fusosomes, e.g., as measured in an assay of Example 63.

[0781] In some embodiments, the fusosome has a density of <1, 1-1.1, 1.05-1.15, 1.1-1.2, 1.15-1.25, 1.2-1.3, 1.25-1.35, or >1.35 g/ml, e.g., by an assay of Example 30.

[0782] In some embodiments, the fusosome composition comprises less than 0.01%, 0.05%, 0.1%, 0.5%, 1%, 1.5%, 2%, 2.5%, 3%, 4%, 5%, or 10% source cells by protein mass or less than 0.01%, 0.05%, 0.1%, 0.5%, 1%, 1.5%, 2%, 2.5%, 3%, 4%, 5%, or 10% of cells have a functional nucleus. In some embodiments, at least 10%, 20%, 30%, 40%, 50%, 60%, 70%, 80%, 90%, 95%, or 99% of fusosomes in the fusosome composition comprise an organelle, e.g., a mitochondrion.

[0783] In some embodiments, the fusosome further comprises an exogenous therapeutic agent. In some embodiments, the exogenous therapeutic agent is chosen from one or more of a protein, e.g., an enzyme, a transmembrane protein, a receptor, an antibody; a nucleic acid, e.g., DNA, a chromosome (e.g. a human artificial chromosome), RNA, mRNA, siRNA, miRNA, or a small molecule.

[0784] In embodiments, the fusosome enters the cell by endocytosis or a non-endocytic pathway.

[0785] In embodiments, the fusosome composition is stable at a temperature of less than 4 C for at least 1, 2, 3, 6, or 12 hours; 1, 2, 3, 4, 5, or 6 days; 1, 2, 3, or 4 weeks; 1, 2, 3, or 6 months; or 1, 2, 3, 4, or 5 years. In embodiments, the fusosome composition is stable at a temperature of less than -20 C for at least 1, 2, 3, 6, or 12 hours; 1, 2, 3, 4, 5, or 6 days; 1, 2, 3, or 4 weeks; 1, 2, 3, or 6 months; or 1, 2, 3, 4, or 5 years. In embodiments, the fusosome composition is stable at a temperature of less than -80 C for at least 1, 2, 3, 6, or 12 hours; 1, 2, 3, 4, 5, or 6 days; 1, 2, 3, or 4 weeks; 1, 2, 3, or 6 months; or 1, 2, 3, 4, or 5 years.

[0786] In embodiments, the fusosome has a size, or the population of fusosomes has an average size, within about 0.01%, 0.05%, 0.1%, 0.5%, 1%, 2%, 3%, 4%, 5%, 10%, 20%, 30%, 40%, 50%, 60%, 70%, 80%, 90%, of that of the source cell, e.g., as measured by an assay of Example 27. In embodiments, the fusosome has a size, or the population of fusosomes has an average size, that is less than about 0.01%, 0.05%, 0.1%, 0.5%, 1%, 2%, 3%, 4%, 5%, 10%, 20%, 30%, 40%, 50%, 60%, 70%, 80%, 90%, of that of the source cell, e.g., as measured by an assay of Example 27. In embodiments, the fusosomes have (or are identified as having) a size less than parental cells. In embodiments, the fusosomes have (or are identified as having) a size within about 50%, 60%, 65%, 70%, 71%, 72%, 73%, 74%, 75%, 80%, or 90% of parental cells. In embodiments, the fusosomes have (or are identified as having) less than about 70%, 60%, 50%, 40%, 30%, 20%, 10%, 5%, 1%, or less of the parental cell's variability in size distribution, e.g., within about 90% of the sample. In embodiments, the fusosomes have (or are identified as having) about 40%, 45%, 50%, 55%, 56%, 57%, 58%, 59%, 60%, 65%, or 70% less of the parental cell's variability in size distribution, e.g., within about 90% of the sample. In some embodiments, fusosomes have (or are identified as having) an average size of greater than 30, 35, 40, 45, 50, 55, 60, 65, or 70 nm in diameter. In embodiments, fusosomes have an average size of about 100, 110, 120, 125, 126, 127, 128, 129, 130, 131, 132, 133, 134, 135, 140, or 150 nm in diameter. In embodiments, the fusosome has a size, or the population of fusosomes has an average size, within about 0.01%-0.05%, 0.05%-0.1%, 0.1%-0.5%, 0.5%-1%, 1%-2%, 2%-3%, 3%-4%, 4%-5%, 5%-10%, 10%-20%, 20%-30%, 30%-40%, 40%-50%, 50%-60%, 60%-70%, 70%-80%, or 80%-90% the size of the source cell, e.g., as measured by an assay of Example 27. In embodiments, the fusosome has a size, or the population of fusosomes has an average size, that is less than about 0.01%-0.05%, 0.05%-0.1%, 0.1%-0.5%, 0.5%-1%, 1%-2%, 2%-3%, 3%-4%, 4%-5%, 5%-10%, 10%-20%, 20%-30%, 30%-40%, 40%-50%, 50%-60%, 60%-70%, 70%-80%, or 80%-90% of the size of the source cell, e.g., as measured by an assay of Example 27. In embodiments, the fusosome has a diameter, or the population of fusosomes has an average diameter, of less than about 500 nm (e.g., less than about 10, 50, 100, 150, 200, 250, 300, 350, 400, or 450 nm), e.g., as measured by an assay of Example 69. In embodiments, the fusosome has a diameter, or the population of fusosomes has an average diameter, of about 80-180, 90-170, 100-160, 110-150, 120-140, or 130 nm, e.g., as measured by an assay of Example 69. In embodiments, the fusosome has a diameter, or the population of fusosomes has an average diameter, of between about 11,000 nm and 21,000 nm, e.g., as measured by an assay of Example 69. In embodiments, the fusosome has a diameter, or the population of fusosomes has an average diameter, between about 10-22,000, 12-20,000, 14-18,720 nm, 20-16,000 nm, e.g., as measured by an assay of Example 69. In embodiments, the fusosome has a volume, or the population of fusosomes has an average volume, of about 0.01-0.1 μm³, 0.02-1 μm³, 0.03-1 μm³, 0.04-1 μm³, 0.05-0.09 μm³, 0.06-0.08 μm³, 0.07 μm³, e.g., as measured by an assay of Example 69. In embodiments, the fusosome has a diameter, or the population of fusosomes has an average diameter, of at least about 10 nm, 20 nm, 30 nm, 40 nm, 50 nm, 60 nm, 70 nm, 80 nm, 90 nm, 100 nm, 150 nm, 200 nm, or 250 nm e.g., as measured by an assay of Example 29. In embodiments, the fusosome has a diameter, or the population of fusosomes has an average diameter, of about 10 nm, 20 nm, 30 nm, 40 nm, 50 nm, 60 nm, 70 nm, 80 nm, 90 nm, 100 nm, 150 nm, 200 nm, or 250 nm (e.g., ±20%) e.g., as measured by an assay of Example 29. In embodiments, the fusosome has a diameter, or the population of fusosomes has an average diameter, of at least about 500 nm, 750 nm, 1,000 nm, 1,500 nm, 2,000 nm, 2,500 nm, 3,000 nm, 5,000 nm, 10,000 nm, or 20,000 nm, e.g., as measured by an assay of Example 29. In embodiments, the fusosome has a diameter, or the population of fusosomes has an average diameter, of about 500 nm, 750 nm, 1,000 nm, 1,500 nm, 2,000 nm, 2,500 nm, 3,000 nm, 5,000 nm, 10,000 nm, or 20,000 nm (e.g., ±20%), e.g., as measured by an assay of Example 29. In embodiments, the population of fusosomes has (or is identified as having) one or more of: a 10% quantile diameter of about 40-90 nm, 45-60 nm, 50-55 nm or 53 nm; a 25% quantile diameter of about 70-100 nm, 80-95 nm, 85-90 nm, or 88 nm; a 75% quantile diameter of about 200-250 nm, 210-240 nm, 220-230 nm, or 226 nm; or a 90% quantile of about 4000-5000 nm, 4300-4600 nm, 4400-4500 nm, 4450 nm, e.g., by an assay of Example 68.

[0787] In embodiments, the fusosome composition comprises (or is identified as comprising) a GAPDH concentration of about 35-40, 36-39, 37-38, or 37.2 ng/mL, e.g., in an assay of Example 82. In embodiments, the GAPDH concentration of the fusosome composition is (or is identified as being) within about 1%, 2%, 5%, 10%, or 20% of the GAPDH concentration of the source cells, e.g., in an assay of Example 82. In embodiments, the GAPDH concentration of the fusosome composition is (or is identified as being) at least 1%, 2%, 5%, 10%, or 20% lower than the the GAPDH concentration of the source cells, e.g., in an assay of Example 82. In embodiments, the the fusosome composition comprises (or is identified as comprising) less than about 30, 35, 40, 45, 46, 47, 48, 49, 50, 55, 60, 65, or 70 μg GAPDH per gram total protein. In embodiments, the fusosome composition comprises (or is identified as comprising) less than about 500, 250, 100, or 50 μg GAPDH per gram total protein. In embodiments, the parental cell comprises (or is identified as comprising) at least 1%, 2.5%, 5%, 10%, 15%, 20%, 30%, 30%, 50%, or more GAPDH per total protein than the fusosome composition.

[0788] In embodiments, the average fractional content of calnexin in the fusosome is (or is identified as being) less than about 1×10⁻⁴, 1.5×10⁻⁴, 2×10⁻⁴, 2.1×10⁻⁴, 2.2×10⁻⁴, 2.3×10₋₄, 2.4×10⁻⁴, 2.43×10⁻⁴, 2.5×10⁻⁴, 2.6×10⁻⁴, 2.7×10⁻⁴, 2.8×10⁻⁴, 2.9×10⁻⁴, 3×10⁻⁴, 3.5×10⁻⁴, or 4×10⁻⁴. In embodiments, the fusosome comprises an amount of calnexin per total protein that is lower than that of the parental cell by about 70%, 75%, 80%, 85%, 88%, 90%, 95%, 99%, or more.

[0789] In some embodiments, fusosomes comprise or are enriched for lipids that affect membrane curvature (see, e.g., Thiam et al., Nature Reviews Molecular Cell Biology, 14(12): 775-785, 2013). Some lipids have a small hydrophilic head group and large hydrophobic tails, which facilitate the formation of a fusion pore by concentrating in a local region. In some embodiments, fusosomes comprise or are enriched for negative-curvature lipids, such as cholesterol, phosphatidylethanolamine (PE), diglyceride (DAG), phosphatidic acid (PA), fatty acid (FA). In some embodiments, fusosomes do not comprise, are depleted of, or have few positive-curvature lipids, such as lysophosphatidylcholine (LPC), phosphatidylinositol (Ptdlns), lysophosphatidic acid (LPA), lysophosphatidylethanolamine (LPE), monoacylglycerol (MAG).

[0790] In some embodiments, the lipids are added to a fusosome. In some embodiments, the lipids are added to source cells in culture which incorporate the lipids into their membranes prior to or during the formation of a fusosome. In some embodiments, the lipids are added to the cells or fusosomes in the form of a liposome. In some embodiments methyl-betacyclodextrane (mβ-CD) is used to enrich or deplete lipids (see, e.g., Kainu et al, Journal of Lipid Research, 51(12): 3533-3541, 2010).

X. Pharmaceutical Compositions and Methods of making them

[0791] The present disclosure also provides, in some aspects, a pharmaceutical composition comprising the fusosome composition described herein and pharmaceutically acceptable carrier. The pharmaceutical compositions can include any of the described fusosomes, e.g. retroviral vectors, or VLPs.

[0792] In some embodiments, one or more transducing units of retroviral vector are administered to the subject. In some embodiments, at least 1, 10, 100, 1000, 10⁴, 10⁵, 10⁶, 10⁷, 10⁸, 10⁹, 10¹⁰, 10¹¹, 10¹², 10¹³, or 10¹⁴, transducing units per kg are administered to the subject. In some embodiments at least 1, 10, 100, 1000, 10⁴, 10⁵, 10⁶, 10⁷, 10⁸, 10⁹, 10¹⁰, 10¹¹, 10¹², 10¹³, or 10¹⁴, transducing units per target cell per ml of blood are administered to the subject.

Concentration and Purification of Retroviral Virus, e.g. Lentivirus

[0793] In some embodiments, a retroviral vector formulation described herein can be produced by a process comprising one or more of, e.g., all of, the following steps (i) to (vi), e.g., in chronological order:
[0794] (i) culturing cells that produce retroviral vector;
[0795] (ii) harvesting the retroviral vector containing supernatant;
[0796] (iii) optionally clarifying the supernatant;
[0797] (iv) purifying the retroviral vector to give a retroviral vector preparation;
[0798] (v) optionally filter-sterilization of the retroviral vector preparation; and
[0799] (vi) concentrating the retroviral vector preparation to produce the final bulk product.

[0800] In some embodiments the process does not comprise the clarifying step (iii). In other embodiments the process does include the clarifying step (iii). In some embodiments, step (vi) is performed using ultrafiltration, or tangential flow filtration, more preferably hollow fiber ultrafiltration. In some embodiments, the purification method in step (iv) is ion exchange chromatography, more preferably anion exchange chromatography. In some embodiments, the filter-sterilisation in step (v) is performed using a 0.22 μm or a 0.2 μm sterilising filter. In some embodiments, step (iii) is performed by filter clarification. In some embodiments, step (iv) is performed using a method or a combination of methods selected from chromatography, ultrafiltration/diafiltration, or centrifugation. In some embodiments, the chromatography method or a combination of methods is selected from ion exchange chromatography, hydrophobic interaction chromatography, size exclusion chromatography, affinity chromatography, reversed phase chromatography, and immobilized metal ion affinity chromatography. In some embodiments, the centrifugation method is selected from zonal centrifugation, isopycnic centrifugation and pelleting centrifugation. In some embodiments, the ultrafiltration/diafiltration method is selected from tangential flow diafiltration, stirred cell diafiltration and dialysis. In some embodiments, at least one step is included into the process to degrade nucleic acid to improve purification. In some embodiments, said step is nuclease treatment.

[0801] In some embodiments, concentration of the vectors is done before filtration. In some embodiments, concentration of the vectors is done after filtration. In some embodiments, concentration and filtrations steps are repeated.

[0802] In some embodiments, the final concentration step is performed after the filter-sterilisation step. In some embodiments, the process is a large scale-process for producing clinical grade formulations that are suitable for administration to humans as therapeutics. In some embodiments, the filter-sterilisation step occurs prior to a concentration step. In some embodiments, the concentration step is the final step in the process and the filter-sterilisation step is the penultimate step in the process. In some embodiments, the concentration step is performed using ultrafiltration, preferably tangential flow filtration, more preferably hollow fiber ultrafiltration. In some embodiments, the filter-sterilisation step is performed using a sterilising filter with a maximum pore size of about 0.22 μm. In another preferred embodiment the maximum pore size is 0.2 μm

[0803] In some embodiments, the vector concentration is less than or equal to about 4.6×10¹¹ RNA genome copies per ml of preparation prior to filter-sterilisation. The appropriate concentration level can be achieved through controlling the vector concentration using, e.g. a dilution step, if appropriate. Thus, in some embodiments, a retroviral vector preparation is diluted prior to filter sterilisation.

[0804] Clarification may be done by a filtration step, removing cell debris and other impurities. Suitable filters may utilize cellulose filters, regenerated cellulose fibers, cellulose fibers combined with inorganic filter aids (e.g. diatomaceous earth, perlite, fumed silica), cellulose filters combined with inorganic filter aids and organic resins, or any combination thereof, and polymeric filters (examples include but are not limited to nylon, polypropylene, polyethersulfone) to achieve effective removal and acceptable recoveries. A multiple stage process may be used. An exemplary two or three-stage process would consist of a coarse filter(s) to remove large precipitate and cell debris followed by polishing second stage filter(s) with nominal pore sizes greater than 0.2 micron but less than 1 micron. The optimal combination may be a function of the precipitate size distribution as well as other variables. In addition, single stage operations employing a relatively small pore size filter or centrifugation may also be used for clarification. More generally, any clarification approach including but not limited to dead-end filtration, microfiltration, centrifugation, or body feed of filter aids (e.g. diatomaceous earth) in combination with dead-end or depth filtration, which provides a filtrate of suitable clarity to not foul the membrane and/or resins in the subsequent steps, will be acceptable to use in the clarification step of the present invention.

[0805] In some embodiments, depth filtration and membrane filtration is used. Commercially available products useful in this regard are for instance mentioned in WO 03/097797, p. 20-21. Membranes that can be used may be composed of different materials, may differ in pore size, and may be used in combinations. They can be commercially obtained from several vendors. In some embodiments, the filter used for clarification is in the range of 1.2 to 0.22 μm. In some embodiments, the filter used for clarification is either a 1.2/0.45 μm filter or an asymmetric filter with a minimum nominal pore size of 0.22 μm

[0806] In some embodiments, the method employs nuclease to degrade contaminating DNA/RNA, i.e. mostly host cell nucleic acids. Exemplary nucleases suitable for use in the present invention include Benzonase® Nuclease (EP 0229866) which attacks and degrades all forms of DNA and RNA (single stranded, double stranded linear or circular) or any other DNase and/or RNase commonly used within the art for the purpose of eliminating unwanted or contaminating DNA and/or RNA from a preparation. In preferred embodiments, the nuclease is Benzonase® Nuclease, which rapidly hydrolyzes nucleic acids by hydrolyzing internal phosphodiester bonds between specific nucleotides, thereby reducing the size of the polynucleotides in the vector containing supernatant. Benzonase® Nuclease can be commercially obtained from Merck KGaA (code W214950). The concentration in which the nuclease is employed is preferably within the range of 1-100 units/ml.

[0807] In some embodiments, the vector suspension is subjected to ultrafiltration (sometimes referred to as diafiltration when used for buffer exchange) at least once during the process, e.g. for concentrating the vector and/or buffer exchange. The process used to concentrate the vector can include any filtration process (e.g., ultrafiltration (UF)) where the concentration of vector is increased by forcing diluent to be passed through a filter in such a manner that the diluent is removed from the vector preparation whereas the vector is unable to pass through the filter and thereby remains, in concentrated form, in the vector preparation. UF is described in detail in, e.g., Microfiltration and Ultrafiltration: Principles and Applications, L. Zeman and A. Zydney (Marcel Dekker, Inc., New York, N.Y., 1996); and in: Ultrafiltration Handbook, Munir Cheryan (Technomic Publishing, 1986; ISBN No. 87762-456-9). A suitable filtration process is Tangential Flow Filtration (“TFF”) as described in, e.g., MILLIPORE catalogue entitled “Pharmaceutical Process Filtration Catalogue” pp. 177-202 (Bedford, Mass., 1995/96). TFF is widely used in the bioprocessing industry for cell harvesting, clarification, purification and concentration of products including viruses. The system is composed of three distinct process streams: the feed solution, the permeate and the retentate. Depending on application, filters with different pore sizes may be used. In some embodiments, the retentate contains the product (lentiviral vector). The particular ultrafiltration membrane selected may have a pore size sufficiently small to retain vector but large enough to effectively clear impurities. Depending on the manufacturer and membrane type, for retroviral vectors nominal molecular weight cutoffs (NMWC) between 100 and 1000 kDa may be appropriate, for instance membranes with 300 kDa or 500 kDa NMWC. The membrane composition may be, but is not limited to, regenerated cellulose, polyethersulfone, polysulfone, or derivatives thereof. The membranes can be flat sheets (also called flat screens) or hollow fibers. A suitable UF is hollow fibre UF, e.g., filtration using filters with a pore size of smaller than 0.1 μm. Products are generally retained, while volume can be reduced through permeation (or be kept constant during diafiltration by adding buffer with the same speed as the speed with which the permeate, containing buffer and impurities, is removed at the permeate side).

[0808] The two most widely used geometries for TFF in the biopharmaceutical industry are plate & frame (flat screens) and hollow fiber modules. Hollow fiber units for ultrafiltration and microfiltration were developed by Amicon and Ramicon in the early 1970s (Cheryan, M. Ultrafiltration Handbook), even though now there are multiple vendors including Spectrum and GE Healthcare. The hollow fiber modules consist of an array of self-supporting fibers with a dense skin layer. Fiber diameters range from 0.5 mm-3 mm. In certain embodiments, hollow fibers are used for TFF. In certain embodiments, hollow fibers of 500 kDa (0.05 μm) pore size are used. Ultrafiltration may comprise diafiltration (DF). Microsolutes can be removed by adding solvent to the solution being ultrafiltered at a rate equal to the UF rate. This washes microspecies from the solution at a constant volume, purifying the retained vector.

[0809] UF/DF can be used to concentrate and/or buffer exchange the vector suspensions in different stages of the purification process. The method can utilize a DF step to exchange the buffer of the supernatant after chromatography or other purification steps, but may also be used prior to chromatography.

[0810] In some embodiments, the eluate from the chromatography step is concentrated and further purified by ultrafiltration-diafiltration. During this process the vector is exchanged into formulation buffer. Concentration to the final desired concentration can take place after the filter-sterilisation step. After said sterile filtration, the filter sterilised substance is concentrated by aseptic UF to produce the bulk vector product.

[0811] In embodiments, the ultrafiltration/diafiltration may be tangential flow diafiltration, stirred cell diafiltration and dialysis.

[0812] Purification techniques tend to involve the separation of the vector particles from the cellular milieu and, if necessary, the further purification of the vector particles. One or more of a variety of chromatographic methods may be used for this purification. Ion exchange, and more particularly anion exchange, chromatography is a suitable method, and other methods could be used. A description of some chromatographic techniques is given below.

[0813] Ion-exchange chromatography utilises the fact that charged species, such as biomolecules and viral vectors, can bind reversibly to a stationary phase (such as a membrane, or else the packing in a column) that has, fixed on its surface, groups that have an opposite charge. There are two types of ion exchangers. Anion exchangers are stationary phases that bear groups having a positive charge and hence can bind species with a negative charge. Cation exchangers bear groups with a negative charge and hence can bind species with positive charge. The pH of the medium has an influence on this, as it can alter the charge on a species. Thus, for a species such as a protein, if the pH is above the pI, the net charge will be negative, whereas below the pI, the net charge will be positive.

[0814] Displacement (elution) of the bound species can be effected by the use of suitable buffers. Thus commonly the ionic concentration of the buffer is increased until the species is displaced through competition of buffer ions for the ionic sites on the stationary phase. An alternative method of elution entails changing the pH of the buffer until the net charge of the species no longer favours biding to the stationary phase. An example would be reducing the pH until the species assumes a net positive charge and will no longer bind to an anion exchanger.

[0815] Some purification can be achieved if impurities are uncharged, or else if they bear a charge of opposite sign to that of the desired species, but the same sign to that on the ion exchanger. This is because uncharged species and those having a charge of the same sign to that an ion exchanger, will not normally bind. For different bound species, the strength of the binding varies with factors such as the charge density and the distribution of charges on the various species. Thus by applying an ionic or pH gradient (as a continuous gradient, or as a series of steps), the desired species might be eluted separately from impurities.

[0816] Size exclusion chromatography is a technique that separates species according to their size. Typically it is performed by the use of a column packed with particles having pores of a well-defined size. For the chromatographic separation, particles are chosen that have pore sizes that are appropriate with regard to the sizes of the species in the mixture to be separated. When the mixture is applied, as a solution (or suspension, in the case of a virus), to the column and then eluted with buffer, the largest particles will elute first as they have limited (or no) access to the pores. Smaller particles will elute later as they can enter the pores and hence take a longer path through the column. Thus in considering the use of size exclusion chromatography for the purification of viral vectors, it would be expected that the vector would be eluted before smaller impurities such as proteins.

[0817] Species, such as proteins, have on their surfaces, hydrophobic regions that can bind reversibly to weakly hydrophobic sites on a stationary phase. In media having a relatively high salt concentration, this binding is promoted. Typically in HIC the sample to be purified is bound to the stationary phase in a high salt environment. Elution is then achieved by the application of a gradient (continuous, or as a series of steps) of decreasing salt concentration. A salt that is commonly used is ammonium sulphate. Species having differing levels of hydrophobicity will tend to be eluted at different salt concentrations and so the target species can be purified from impurities. Other factors, such as pH, temperature and additives to the elution medium such as detergents, chaotropic salts and organics can also influence the strength of binding of species to HIC stationary phases. One, or more, of these factors can be adjusted or utilised to optimise the elution and purification of product.

[0818] Viral vectors have on their surface, hydrophobic moieties such as proteins, and thus HIC could potentially be employed as a means of purification.

[0819] Like HIC, RPC separates species according to differences in their hydrophobicities. A stationary phase of higher hydrophobicity than that employed in HIC is used. The stationary phase often consists of a material, typically silica, to which are bound hydrophobic moieties such as alkyl groups or phenyl groups. Alternatively the stationary phase might be an organic polymer, with no attached groups. The sample-containing the mixture of species to be resolved is applied to the stationary phase in an aqueous medium of relatively high polarity which promotes binding. Elution is then achieved by reducing the polarity of the aqueous medium by the addition of an organic solvent such as isopropanol or acetonitrile. Commonly a gradient (continuous, or as a series of steps) of increasing organic solvent concentration is used and the species are eluted in order of their respective hydrophobicities.

[0820] Other factors, such as the pH of the elution medium, and the use of additives, can also influence the strength of binding of species to RPC stationary phases. One, or more, of these factors can be adjusted or utilised to optimise the elution and purification of product. A common additive is trifluororacetic acid (TFA). This suppresses the ionisation of acidic groups such as carboxyl moieties in the sample. It also reduces the pH in the eluting medium and this suppresses the ionisation of free silanol groups that may be present on the surface of stationary phases having a silica matrix. TFA is one of a class of additives known as ion pairing agents. These interact with ionic groups, present on species in the sample, that bear an opposite charge. The interaction tends to mask the charge, increasing the hydrophobicity of the species. Anionic ion pairing agents, such as TFA and pentafluoropropionic acid interact with positively charged groups on a species. Cationic ion pairing agents such, as triethylamine, interact with negatively charged groups.

[0821] Viral vectors have on their surface, hydrophobic moieties such as proteins, and thus RPC, potentially, could be employed as a means of purification.

[0822] Affinity chromatography utilises the fact that certain ligands that bind specifically with biomolecules such as proteins or nucleotides, can be immobilised on a stationary phase. The modified stationary phase can then be used to separate the relevant biomolecule from a mixture. Examples of highly specific ligands are antibodies, for the purification of target antigens and enzyme inhibitors for the purification of enzymes. More general interactions can also be utilised such as the use of the protein A ligand for the isolation of a wide range of antibodies.

[0823] Typically, affinity chromatography is performed by application of a mixture, containing the species of interest, to the stationary phase that has the relevant ligand attached. Under appropriate conditions this will lead to the binding of the species to the stationary phase. Unbound components are then washed away before an eluting medium is applied. The eluting medium is chosen to disrupt the binding of the ligand to the target species. This is commonly achieved by choice of an appropriate ionic strength, pH or by the use of substances that will compete with the target species for ligand sites. For some bound species, a chaotropic agent such as urea is used to effect displacement from the ligand. This, however, can result in irreversible denaturation of the species.

[0824] Viral vectors have on their surface, moieties such as proteins, that might be capable of binding specifically to appropriate ligands. This means that, potentially, affinity chromatography could be used in their isolation.

[0825] Biomolecules, such as proteins, can have on their surface, electron donating moieties that can form coordinate bonds with metal ions. This can facilitate their binding to stationary phases carrying immobilised metal ions such as Ni²⁺, Cu²⁺, Zn²⁺ or Fe³⁺. The stationary phases used in IMAC have chelating agents, typically nitriloacetic acid or iminodiacetic acid covalently attached to their surface and it is the chelating agent that holds the metal ion. It is necessary for the chelated metal ion to have at least one coordination site left available to form a coordinate bond to a biomolecule. Potentially there are several moieties on the surface of biomolecules that might be capable of bonding to the immobilised metal ion. These include histidine, tryptophan and cysteine residues as well as phosphate groups. For proteins, however, the predominant donor appears to be the imidazole group of the histidine residue. Native proteins can be separated using IMAC if they exhibit suitable donor moieties on their surface. Otherwise IMAC can be used for the separation of recombinant proteins bearing a chain of several linked histidine residues.

[0826] Typically, IMAC is performed by application of a mixture, containing the species of interest, to the stationary phase. Under appropriate conditions this will lead to the coordinate bonding of the species to the stationary phase. Unbound components are then washed away before an eluting medium is applied. For elution, gradients (continuous, or as a series of steps) of increasing salt concentration or decreasing pH may be used. Also a commonly used procedure is the application of a gradient of increasing imidazole concentration. Biomolecules having different donor properties, for example having histidine residues in differing environments, can be separated by the use of gradient elution.

[0827] Viral vectors have on their surface, moieties such as proteins, that might be capable of binding to IMAC stationary phases. This means that, potentially, IMAC could be used in their isolation.

[0828] Suitable centrifugation techniques include zonal centrifugation, isopycnic ultra and pelleting centrifugation.

[0829] Filter-sterilisation is suitable for processes for pharmaceutical grade materials. Filter-sterilisation renders the resulting formulation substantially free of contaminants. The level of contaminants following filter-sterilisation is such that the formulation is suitable for clinical use. Further concentration (e.g. by ultrafiltration) following the filter-sterilisation step may be performed in aseptic conditions. In some embodiments, the sterilising filter has a maximum pore size of 0.22 μm.

[0830] The retroviral vectors herein can also be subjected to methods to concentrate and purify a lentiviral vector using flow-through ultracentrifugation and high-speed centrifugation, and tangential flow filtration. Flow through ultracentrifugation can be used for the purification of RNA tumor viruses (Toplin et al, Applied Microbiology 15:582-589, 1967; Burger et al., Journal of the National Cancer Institute 45: 499-503, 1970). Flow-through ultracentrifugation can be used for the purification of Lentiviral vectors. This method can comprise one or more of the following steps. For example, a lentiviral vector can be produced from cells using a cell factory or bioreactor system. A transient transfection system can be used or packaging or producer cell lines can also similarly be used. A pre-clarification step prior to loading the material into the ultracentrifuge could be used if desired. Flow-through ultracentrifugation can be performed using continuous flow or batch sedimentation. The materials used for sedimentation are, e.g.: Cesium chloride, potassium tartrate and potassium bromide, which create high densities with low viscosity although they are all corrosive. CsCl is frequently used for process development as a high degree of purity can be achieved due to the wide density gradient that can be created (1.0 to 1.9 g/cm³). Potassium bromide can be used at high densities, e.g., at elevated temperatures, such as 25° C., which may be incompatible with stability of some proteins. Sucrose is widely used due to being inexpensive, non-toxic and can form a gradient suitable for separation of most proteins, sub-cellular fractions and whole cells. Typically the maximum density is about 1.3 g/cm³. The osmotic potential of sucrose can be toxic to cells in which case a complex gradient material can be used, e.g. Nycodenz. A gradient can be used with 1 or more steps in the gradient. An embodiment is to use a step sucrose gradient. The volume of material can be from 0.5 liters to over 200 liters per run. The flow rate speed can be from 5 to over 25 liters per hour. A suitable operating speed is between 25,000 and 40,500 rpm producing a force of up to 122,000×g. The rotor can be unloaded statically in desired volume fractions. An embodiment is to unload the centrifuged material in 100 ml fractions. The isolated fraction containing the purified and concentrated Lentiviral vector can then be exchanged in a desired buffer using gel filtration or size exclusion chromatography. Anionic or cationic exchange chromatography could also be used as an alternate or additional method for buffer exchange or further purification. In addition, Tangential Flow Filtration can also be used for buffer exchange and final formulation if required. Tangential Flow Filtration (TFF) can also be used as an alternative step to ultra or high speed centrifugation, where a two step TFF procedure would be implemented. The first step would reduce the volume of the vector supernatant, while the second step would be used for buffer exchange, final formulation and some further concentration of the material. The TFF membrane can have a membrane size of between 100 and 500 kilodaltons, where the first TFF step can have a membrane size of 500 kilodaltons, while the second TFF can have a membrane size of between 300 to 500 kilodaltons. The final buffer should contain materials that allow the vector to be stored for long term storage.

[0831] In embodiments, the method uses either cell factories that contains adherent cells, or a bioreactor that contains suspension cells that are either transfected or transduced with the vector and helper constructs to produce lentiviral vector. Non limiting examples or bioreactors, include the Wave bioreactor system and the Xcellerex bioreactors. Both are disposable systems. However non-disposable systems can also be used. The constructs can be those described herein, as well as other lentiviral transduction vectors. Alternatively the cell line can be engineered to produce Lentiviral vector without the need for transduction or transfection. After transfection, the lentiviral vector can be harvested and filtered to remove particulates and then is centrifuged using continuous flow high speed or ultra centrifugation. A preferred embodiment is to use a high speed continuous flow device like the JCF-A zonal and continuous flow rotor with a high speed centrifuge. Also preferably is the use of Contifuge Stratus centrifuge for medium scale Lentiviral vector production. Also suitable is any continuous flow centrifuge where the speed of centrifugation is greater than 5,000×g RCF and less than 26,000×g RCF. Preferably, the continuous flow centrifugal force is about 10,500×g to 23,500×g RCF with a spin time of between 20 hours and 4 hours, with longer centrifugal times being used with slower centrifugal force. The lentiviral vector can be centrifuged on a cushion of more dense material (a non limiting example is sucrose but other reagents can be used to form the cushion and these are well known in the art) so that the Lentiviral vector does not form aggregates that are not filterable, as sometimes occurrs with straight centrifugation of the vector that results in a viral vector pellet. Continuous flow centrifugation onto a cushion allows the vector to avoid large aggregate formation, yet allows the vector to be concentrated to high levels from large volumes of transfected material that produces the Lentiviral vector. In addition, a second less-dense layer of sucrose can be used to band the Lentiviral vector preparation. The flow rate for the continuous flow centrifuge can be between 1 and 100 ml per minute, but higher and lower flow rates can also be used. The flow rate is adjusted to provide ample time for the vector to enter the core of the centrifuge without significant amounts of vector being lost due to the high flow rate. If a higher flow rate is desired, then the material flowing out of the continuous flow centrifuge can be re-circulated and passed through the centrifuge a second time. After the virus is concentrated using continuous flow centrifugation, the vector can be further concentrated using Tangential Flow Filtration (TFF), or the TFF system can be simply used for buffer exchange. A non-limiting example of a TFF system is the Xampler cartridge system that is produced by GB-Healthcare. Preferred cartridges are those with a MW cut-off of 500,000 MW or less. Preferably a cartridge is used with a MW cut-off of 300,000 MW. A cartridge of 100,000 MW cut-off can also be used. For larger volumes, larger cartridges can be used and it will be easy for those in the art to find the right TFF system for this final buffer exchange and/or concentration step prior to final fill of the vector preparation. The final fill preparation may contain factors that stabilize the vector—sugars are generally used and are known in the art.

[0832] Protein Content

[0833] In some embodiments the retroviral particle includes various source cell genome-derived proteins, exogenous proteins, and viral-genome derived proteins. In some embodiments the retroviral particle contains various ratios of source cell genome-derived proteins to viral-genome-derived proteins, source cell genome-derived proteins to exogenous proteins, and exogenous proteins to viral-genome derived proteins.

[0834] In some embodiments, the viral-genome derived proteins are GAG polyprotein precursor, HIV-1 Integrase, POL polyprotein precursor, Capsid, Nucleocapsid, p17 matrix, p6, p2, VPR, Vif.

[0835] In some embodiments, the source cell-derived proteins are Cyclophilin A, Heat Shock 70 kD, Human Elongation Factor-1 Alpha (EF-1R), Histones H1, H2A, H3, H4, beta-globin, Trypsin Precursor, Parvulin, Glyceraldehyde-3-phosphate dehydrogenase, Lck, Ubiquitin, SUMO-1, CD48, Syntenin-1, Nucleophosmin, Heterogeneous nuclear ribonucleoproteins C1/C2, Nucleolin, Probable ATP-dependent helicase DDX48, Matrin-3, Transitional ER ATPase, GTP-binding nuclear protein Ran, Heterogeneous nuclear ribonucleoprotein U, Interleukin enhancer binding factor 2, Non-POU domain containing octamer binding protein, RuvB like 2, HSP 90-b, HSP 90-a, Elongation factor 2, D-3-phosphoglycerate dehydrogenase, a-enolase, C-1-tetrahydrofolate synthase, cytoplasmic, Pyruvate kinase, isozymes M1/M2, Ubiquitin activating enzyme E1, 26S protease regulatory subunit S10B, 60S acidic ribosomal protein P2, 60S acidic ribosomal protein P0, 40S ribosomal protein SA, 40S ribosomal protein S2, 40S ribosomal protein S3, 60S ribosomal protein L4, 60S ribosomal protein L3, 40S ribosomal protein S3a, 40S ribosomal protein S7, 60S ribosomal protein L7a, 60S acidic ribosomal protein L31, 60S ribosomal protein L10a, 60S ribosomal protein L6, 26S proteasome non-ATPase regulatory subunit 1, Tubulin b-2 chain, Actin, cytoplasmic 1, Actin, aortic smooth muscle, Tubulin a-ubiquitous chain, Clathrin heavy chain 1, Histone H2B.b, Histone H4, Histone H3.1, Histone H3.3, Histone H2A type 8, 26S protease regulatory subunit 6A, Ubiquitin-4, RuvB like 1, 26S protease regulatory subunit 7, Leucyl-tRNA synthetase, cytoplasmic, 60S ribosomal protein L19, 26S proteasome non-ATPase regulatory subunit 13, Histone H2B.F, U5 small nuclear ribonucleoprotein 200 kDa helicase, Poly[ADP-ribose]polymerase-1, ATP-dependent DNA helicase II, DNA replication licensing factor MCM5, Nuclease sensitive element binding protein 1, ATP-dependent RNA helicase A, Interleukin enhancer binding factor 3, Transcription elongation factor B polypeptide 1, Pre-mRNA processing splicing factor 8, Staphylococcal nuclease domain containing protein 1, Programmed cell death 6-interacting protein, Mediator of RNA polymerase II transcription subunit 8 homolog, Nucleolar RNA helicase II, Endoplasmin, DnaJ homolog subfamily A member 1, Heat shock 70 kDa protein 1L, T-complex protein 1 e subunit, GCN1-like protein 1, Serotransferrin, Fructose bisphosphate aldolase A, Inosine-5′monophosphate dehydrogenase 2, 26S protease regulatory subunit 6B, Fatty acid synthase, DNA-dependent protein kinase catalytic subunit, 40S ribosomal protein S17, 60S ribosomal protein L7, 60S ribosomal protein L12, 60S ribosomal protein L9, 40S ribosomal protein S8, 40S ribosomal protein S4 X isoform, 60S ribosomal protein L11, 26S proteasome non-ATPase regulatory subunit 2, Coatomer a subunit, Histone H2A.z, Histone H1.2, Dynein heavy chain cytosolic. See: Saphire et al., Journal of Proteome Research, 2005, and Wheeler et al., Proteomics Clinical Applications, 2007.

[0836] In some embodiments the retroviral vector is pegylated.

### Particle Size

[0837] In some embodiments the median retroviral vector diameter is between 10 and 1000 nM, 25 and 500 nm 40 and 300 nm, 50 and 250 nm, 60 and 225 nm, 70 and 200 nm, 80 and 175 nm, or 90 and 150 nm.

[0838] In some embodiments, 90% of the retroviral vectors fall within 50% of the median diameter of the retrovirus. In some embodiments, 90% of the retroviral vectors fall within 25% of the median diameter of the retrovirus. In some embodiments, 90% of the retroviral vectors fall within 20% of the median diameter of the retrovirus. In some embodiments, 90% of the retroviral vectors fall within 15% of the median diameter of the retrovirus. In some embodiments, 90% of the retroviral vectors fall within 10% of the median diameter of the retrovirus.

### XI. Indications and Uses

[0839] The fusosomes, retroviral vectors, VLPs, or pharmaceutical compositions described herein can be administered to a subject, e.g., a mammal, e.g., a human. In such embodiments, the subject may be at risk of, may have a symptom of, or may be diagnosed with or identified as having, a particular disease or condition (e.g., a disease or condition described herein). In some embodiments, the disease is a genetic deficiency, e.g., a genetic deficiency listed in Table 5 or Table 6.

[0840] This disclosure also provides, in certain aspects, a method of administering a fusosome composition to a subject (e.g., a human subject), a target tissue, or a cell, comprising administering to the subject, or contacting the target tissue or the cell with a fusosome composition comprising a plurality of fusosomes described herein, a fusosome composition described herein, or a pharmaceutical composition described herein, thereby administering the fusosome composition to the subject.

[0841] This disclosure also provides, in certain aspects, a method of delivering a therapeutic agent (e.g., a polypeptide, a nucleic acid, a metabolite, an organelle, or a subcellular structure) to a subject, a target tissue, or a cell, comprising administering to the subject, or contacting the target tissue or the cell with, a plurality of fusosomes described herein, a fusosome composition comprising a plurality of fusosomes described herein, a fusosome composition described herein, or a pharmaceutical composition described herein, wherein the fusosome composition is administered in an amount and/or time such that the therapeutic agent is delivered.

[0842] This disclosure also provides, in certain aspects, a method of delivering a function to a subject, a target tissue, or a cell, comprising administering to the subject, or contacting the target tissue or the cell with, a plurality of fusosomes described herein, a fusosome composition comprising a plurality of fusosomes described herein, a fusosome composition described herein, or a pharmaceutical composition described herein, wherein the fusosome composition is administered in an amount and/or time such that the function is delivered.

[0843] Target cells from mammalian (e.g., human) tissue include cells from epithelial, connective, muscular, or nervous tissue or cells, and combinations thereof. Target mammalian (e.g., human) cells and organ systems include the cardiovascular system (heart, vasculature); digestive system (esophagus, stomach, liver, gallbladder, pancreas, intestines, colon, rectum and anus); endocrine system (hypothalamus, pituitary gland, pineal body or pineal gland, thyroid, parathyroids, adrenal glands); excretory system (kidneys, ureters, bladder); lymphatic system (lymph, lymph nodes, lymph vessels, tonsils, adenoids, thymus, spleen); integumentary system (skin, hair, nails); muscular system (e.g., skeletal muscle); nervous system (brain, spinal cord, nerves)’; reproductive system (ovaries, uterus, mammary glands, testes, vas deferens, seminal vesicles, prostate); respiratory system (pharynx, larynx, trachea, bronchi, lungs, diaphragm); skeletal system (bone, cartilage), and combinations thereof. In some embodiments, a non-target cells or organ system is chosen from the cardiovascular system (heart, vasculature); digestive system (esophagus, stomach, liver, gallbladder, pancreas, intestines, colon, rectum and anus); endocrine system (hypothalamus, pituitary gland, pineal body or pineal gland, thyroid, parathyroids, adrenal glands); excretory system (kidneys, ureters, bladder); lymphatic system (lymph, lymph nodes, lymph vessels, tonsils, adenoids, thymus, spleen); integumentary system (skin, hair, nails); muscular system (e.g., skeletal muscle); nervous system (brain, spinal cord, nerves)’; reproductive system (ovaries, uterus, mammary glands, testes, vas deferens, seminal vesicles, prostate); respiratory system (pharynx, larynx, trachea, bronchi, lungs, diaphragm); skeletal system (bone, cartilage), and combinations thereof.

[0844] The administration of a pharmaceutical composition described herein may be by way of oral, inhaled, transdermal or parenteral (including intravenous, intratumoral, intraperitoneal, intramuscular, intracavity, and subcutaneous) administration. The fusosomes may be administered alone or formulated as a pharmaceutical composition.

[0845] In embodiments, the fusosome composition mediates an effect on a target cell, and the effect lasts for at least 1, 2, 3, 4, 5, 6, or 7 days, 2, 3, or 4 weeks, or 1, 2, 3, 6, or 12 months. In some embodiments (e.g., wherein the fusosome composition comprises an exogenous protein), the effect lasts for less than 1, 2, 3, 4, 5, 6, or 7 days, 2, 3, or 4 weeks, or 1, 2, 3, 6, or 12 months.

[0846] In embodiments, the fusosome composition described herein is delivered ex-vivo to a cell or tissue, e.g., a human cell or tissue.

[0847] The fusosome compositions described herein can be administered to a subject, e.g., a mammal, e.g., a human. In such embodiments, the subject may be at risk of, may have a symptom of, or may be diagnosed with or identified as having, a particular disease or condition (e.g., a disease or condition described herein).

[0848] In some embodiments, the source of fusosomes are from the same subject that is administered a fusosome composition. In other embodiments, they are different. For example, the source of fusosomes and recipient tissue may be autologous (from the same subject) or heterologous (from different subjects). In either case, the donor tissue for fusosome compositions described herein may be a different tissue type than the recipient tissue. For example, the donor tissue may be muscular tissue and the recipient tissue may be connective tissue (e.g., adipose tissue). In other embodiments, the donor tissue and recipient tissue may be of the same or different type, but from different organ systems.

[0849] In some embodiments, the fusosome is co-administered with an inhibitor of a protein that inhibits membrane fusion. For example, Suppressyn is a human protein that inhibits cell-cell fusion (Sugimoto et al., “A novel human endogenous retroviral protein inhibits cell-cell fusion” Scientific Reports 3:1462 DOI: 10.1038/srep01462). Thus, in some embodiments, the fusosome is co-administered with an inhibitor of sypressyn, e.g., a siRNA or inhibitory antibody.

[0850] Compositions described herein may also be used to similarly modulate the cell or tissue function or physiology of a variety of other organisms including but not limited to: farm or working animals (horses, cows, pigs, chickens etc.), pet or zoo animals (cats, dogs, lizards, birds, lions, tigers and bears etc.), aquaculture animals (fish, crabs, shrimp, oysters etc.), plants species (trees, crops, ornamentals flowers etc), fermentation species (saccharomyces etc.). Fusosome compositions described herein can be made from such non-human sources and administered to a non-human target cell or tissue or subject.

[0851] Fusosome compositions can be autologous, allogeneic or xenogeneic to the target.

### XII. Additional Therapeutic Agents

[0852] In some embodiments, the fusosome composition is co-administered with an additional agent, e.g., a therapeutic agent, to a subject, e.g., a recipient, e.g., a recipient described herein. In some embodiments, the co-administered therapeutic agent is an immunosuppressive agent, e.g., a glucocorticoid (e.g., dexamethasone), cytostatic (e.g., methotrexate), antibody (e.g., Muromonab-CD3), or immunophilin modulator (e.g., Ciclosporin or rapamycin). In embodiments, the immunosuppressive agent decreases immune mediated clearance of fusosomes. In some embodiments the fusosome composition is co-administered with an immunostimulatory agent, e.g., an adjuvant, an interleukin, a cytokine, or a chemokine.

[0853] In some embodiments, the fusosome composition and the immunosuppressive agent are administered at the same time, e.g., contemporaneously administered. In some embodiments, the fusosome composition is administered before administration of the immunosuppressive agent. In some embodiments, the fusosome composition is administered after administration of the immunosuppressive agent.

[0854] In some embodiments, the immunosuppressive agent is a small molecule such as ibuprofen, acetaminophen, cyclosporine, tacrolimus, rapamycin, mycophenolate, cyclophosphamide, glucocorticoids, sirolimus, azathriopine, or methotrexate.

[0855] In some embodiments, the immunosuppressive agent is an antibody molecule, including but not limited to: muronomab (anti-CD3), Daclizumab (anti-IL12), Basiliximab, Infliximab (Anti-TNFa), or rituximab (Anti-CD20).

[0856] In some embodiments, co-administration of the fusosome composition with the immunosuppressive agent results in enhanced persistence of the fusosome composition in the subject compared to administration of the fusosome composition alone. In some embodiments, the enhanced persistence of the fusosome composition in the co-administration is at least 10%, 20%, 30%, 40%, 50%, 60%, 70%, 80%, 90% or longer, compared to persistence of the fusosome composition when administered alone. In some embodiments, the enhanced persistence of the fusosome composition in the co-administration is at least 1, 2, 3, 4, 5, 6, 7, 10, 15, 20, 25, or 30 days or longer, compared to survival of the fusosome composition when administered alone.

### EXAMPLES

[0857] The Examples below are set forth to aid in the understanding of the inventions, but are not intended to, and should not be construed to, limit its scope in any way.

### Example 1. Assaying Off-Target Cells to Detect Specificity of Retroviral Nucleic Acid Delivery

[0858] This Example describes quantification of a nucleic acid in off-target recipient cells by measuring vector copy number in single cells.

[0859] In an embodiment, treated mice have a similar vector copy number in off-target cells as those from untreated mice, e.g., no vector or a vector number similar to negative control levels. In an embodiment, treated mice have a similar percent of off-target cells that contain the vector as those from untreated mice, e.g., no cells or a cell number similar to negative control levels.

[0860] In this example, the off-target recipient cell is a CD11c+ cell. However, this protocol may be adapted to any cell type for which suitable surface markers exist and which can be isolated from the subject. Notably, the methods described herein may be equally applicable to humans, rats, monkeys with optimization to the protocol.

[0861] Mice are treated with retroviral vector produced as described herein or with PBS (negative control). 28 days following treatment, peripheral blood is collected from mice that received retroviral vector and mice that received PBS treatment. Blood is collected into 1 ml PBS containing 5 μM EDTA and mixed immediately to prevent clotting. The tubes are kept on ice and red blood cells are removed using a buffered ammonium chloride (ACK) solution. Cells are stained with a murine CD11c:APC-Cy7 antibody (Biolegend Catalog #: 117323) or an isotype control APC-Cy7 antibody (Biolegend Catalog #: 400230) at 4° C. for 30 minutes in the dark, after being Fc blocked (Biolegend Catalog #: 101319) in cell staining buffer (Biolegend Catalog #: 420201) for 10 minutes. After being washed two times with PBS, cells are analyzed on a FACS Aria (BD Biosciences, San Jose, Calif.) with 640 nm laser excitation and emission collected at 780−/+60 nm running the FACSDiva™ software (BD Biosciences, San Jose, Calif.) to set negative gates using the isotype control APC-Cy7 antibody labeled cells. APC-Cy7 positive cells are sorted into single wells of plate for vector copy number analysis.

[0862] Vector copy number is assessed using single-cell nested PCR. PCR is performed with qPCR using primers and probes specific to the vector and an endogenous control gene. Vector copy number is determined by dividing the amount of vector qPCR signal by the amount of the endogenous control gene qPCR signal. A cell that received the vector will have a vector copy number of at least 1.0. Vector copy number is assessed across the population by averaging the vector copy number of the plurality of cells

[0863] In some embodiments, mice treated with retroviral vectors have a similar average vector copy number in off-target cells as those from mice treated with vehicle. In some embodiments, mice treated with treated with retroviral vectors have a similar percent of off-target cells that received the vector as those from mice treated with vehicle.

### Example 2. Assaying Off-Target Cells to Detect Specificity of Delivery of an Exogenous Protein Agent

[0864] This Example describes quantification of the expression of an exogenous agent in off-target recipient cells by exogenous agent expression in single cells.

[0865] In an embodiment, treated mice have similar exogenous agent expression in off-target cells as those from untreated mice. In an embodiment, treated mice have a similar percent of off-target cells that express the exogenous agent as those from untreated mice.

[0866] In this example, the off-target recipient cell is a CD11c+ cell. However, this protocol may be adapted to any cell type for which suitable surface markers exist and which can be isolated from the subject. Notably, the methods described herein may be equally applicable to humans, rats, monkeys with optimization to the protocol. In this example the exogenous agent is a fluorescent protein and expression is measured via flow cytometry. In other embodiments, the expression of an exogenous protein agent may be measured with immunostaining for the protein. In other embodiments expression of the exogenous protein agent may be measured via microscopy or western blot.

[0867] Mice are treated with retroviral vector with a tdtomato fluorescent protein agent produced via any of the methods described in this application or with PBS (negative control). 28 days following treatment, peripheral blood is collected from mice that received retroviral vector and mice that received PBS treatment. Blood is collected into 1 ml PBS containing 5 μM EDTA and mixed immediately to prevent clotting. The tubes are kept on ice and red blood cells are removed using a buffered ammonium chloride (ACK) solution. Cells are stained with a murine CD11c:APC-Cy7 antibody (Biolgend Catalog #: 117323)or isotype controls APC-Cy7 antibody (Biolegend Catalog #: 400230) at 4° C. for 30 minutes in the dark, after being Fc blocked (Biolegend Catalog #: 101319) in cell staining buffer (Biolegend Catalog #: 420201) for 10 minutes. After being washed two times with PBS, cells are analyzed on a FACS Aria (BD Biosciences, San Jose, Calif.) running the FACSDiva™ software (BD Biosciences, San Jose, Calif.). A negative gate for CD11c is set using the isotype control APC-Cy7 antibody labeled cells and with a 640 nm laser excitation and emission collected at 780−/+60. A negative gate for tdtomato expression is set with cells isolated from mice treated with vehicle and with a 552 nm laser excitation and an emission collected at 585−/+42 nm.

[0868] The percent of CD11c+ cells that are tdtomato positive is measured. In some embodiments, the percent of CD11c+ cells that are tdtomato positive is similar in cells from treated and untreated mice. The median tdtomato fluorescence level is measured in CD11c+ cells. In some embodiments, the median tdtomato fluorescence level in CD11c+ cells is similar in cells from treated and untreated mice.

### Example 3. Assaying Target Cells to Detect Specificity of Retroviral Nucleic Acid Delivery

[0869] This Example describes quantification of a nucleic acid in target recipient cells by measuring vector copy number in single cells.

[0870] In an embodiment, treated mice have a greater vector copy number in target cells than those from untreated mice. In an embodiment, treated mice have a greater percent of target cells that contain the vector than those from untreated mice.

[0871] In this example, the target recipient cell is a CD3+ cell. However, this protocol may be adapted to any cell type for which suitable surface markers exist and which can be isolated from the subject. Notably, the methods described herein may be equally applicable to humans, rats, monkeys with optimization to the protocol.

[0872] Mice are treated with retroviral vector and a blood sample is collected as described above in Example 1. Cells are stained with a murine CD3:APC-Cy7 antibody (Biolegend Catalog #: 100330) or an isotype control using the protocol described above in Example 1. Vector copy number is assessed using single-cell nested PCR as described in Example 1.

[0873] In some embodiments, mice treated with retroviral vectors have a greater average vector copy number in target cells than those from mice treated with vehicle. In some embodiments, mice treated with treated with retroviral vectors have a greater percent of target cells that received the vector than those from mice treated with vehicle.

### Example 4. Assaying Target Cells to Detect Specificity of Delivery of an Exogenous Protein Agent

[0874] This Example describes quantification of the expression of an exogenous protein agent in target recipient cells by exogenous protein agent expression in single cells.

[0875] In an embodiment, treated mice have greater exogenous protein agent expression in target cells than those from untreated mice. In an embodiment, treated mice have a greater percent of target cells that express the exogenous protein agent than those from untreated mice.

[0876] In this example, the target recipient cell is a CD3+ cell. However, this protocol may be adapted to any cell type for which suitable surface markers exist and which can be isolated from the subject. Notably, the methods described herein may be equally applicable to humans, rats, monkeys with optimization to the protocol. In this example the exogenous protein agent is a fluorescent protein and expression is measured via flow cytometry. In other embodiments, the expression of an exogenous protein agent may be measured with immunostaining for the protein. In other embodiments expression of the exogenous protein agent may be measured via microscopy or western blot.

[0877] Mice are treated with retroviral vector and a blood sample is collected as described above in Example 2. Cells are stained with a murine CD3:APC-Cy7 antibody (Biolegend Catalog #: 100330) or isotype controls and analyzed by flow cytometry using the protocol described in Example 2.

[0878] The percent of CD3+ cells that are tdtomato positive is measured. In some embodiments, the percent of CD3+ cells that are tdtomato positive is greater in cells from treated than untreated mice. The median tdtomato fluorescence level is measured in CD3+ cells. In some embodiments, the median tdtomato fluorescence level in CD3+ cells is greater in cells from treated than untreated mice.

### Example 5. Modification of Retroviral Vector with HLA-G or HLA-E for Decreased Cytotoxicity Mediated by PBMC Cell Lysis

[0879] This Example describes retroviral vectors derived from cells modified to have decreased cytotoxicity due to cell lysis by peripheral blood mononuclear cells (PBMCs).

[0880] In an embodiment, cytotoxicity mediated cell lysis of retroviral vectors by PBMCs is a measure of immunogenicity of retroviral vectors, as lysis will reduce, e.g., inhibit or stop, the activity of a retroviral vector.

[0881] Retroviral vectors are created from: unmodified cells (hereinafter NMCs, positive control), cells that are transfected with HLA-G or HLA-E cDNA (hereinafter NMC-HLA-G), and cells transfected with an empty vector control (hereinafter NMC-empty vector, negative control).

[0882] PBMC mediated lysis of a retroviral vector is determined by europium release assays as described in Bouma, et al. Hum. Immunol. 35(2):85-92; 1992 & van Besouw et al. Transplantation 70(1):136-143; 2000. PBMCs (hereinafter effector cells) are isolated from an appropriate donor, and stimulated with allogeneic gamma irradiated PMBCs and 200 IU/mL IL-2 (proleukin, Chiron BV Amsterdam, The Netherlands) in a round bottom 96 well plate for 7 days at 37° C. The retroviral vectors are labeled with europium-diethylenetriaminepentaacetate (DTPA) (sigma, St. Louis, Mo., USA).

[0883] At day 7 cytotoxicity-mediated lysis assays is performed by incubating ⁶³Eu-labelled retroviral vector with effector cells in a 96-well plate for 1, 2, 3, 4, 5, 6, 8, 10, 15, 20, 24, or 48 hours after plating at effector/target ratios ranging from 1000:1-1:1 and 1:1.25-1:1000. After incubation, the plates are centrifuged and a sample of the supernatant is transferred to 96-well plates with low background fluorescence (fluoroimmunoplates, Nunc, Roskilde, Denmark).

[0884] Subsequently, enhancement solution (PerkinElmer, Groningen, The Netherlands) is added to each well. The released europium is measured in a time-resolved fluorometer (Victor 1420 multilabel counter, LKB-Wallac, Finland). Fluorescence is expressed in counts per second (CPS). Maximum percent release of europium by a target retroviral vector is determined by incubating an appropriate number (1×10²-1×10⁸) of retroviral vectors with 1% triton (sigma-aldrich) for an appropriate amount of time. Spontaneous release of europium by target retroviral vector is measured by incubation of labeled target retroviral vector without effector cells. Percentage leakage is then calculated as: (spontaneous release/maximum release)×100%. The percentage of cytotoxicity mediated lysis is calculated as % lysis=[(measured lysis-spontaneous lysis-spontaneous release)/(maximum release-spontaneous release)]×100%. The data is analyzed by looking at the percentage of lysis as a function of different effector target ratios.

[0885] In an embodiment, retroviral vectors generated from NMC-HLA-G cells will have a decreased percentage of lysis by target cells at specific timepoints as compared to retroviral vectors generated from NMCs or NMC-empty vector.

### Example 6. Modification of Retroviral Vector with HLA-G or HLA-E for Decreased NK Lysis Activity

[0886] This Example describes the generation of a retroviral vector composition derived from a cell source which has been modified to decrease cytotoxicity mediated cell lysis by NK cells. In an embodiment cytotoxicity mediated cell lysis of retroviral vectors by NK cells is a measure of immunogenicity for retroviral vectors.

[0887] Retroviral vectors are created from: unmodified cells (hereinafter NMCs, positive control), cells that are transfected with HLA-G or HLA-E cDNA (hereinafter NMC-HLA-G), and cells transfected with an empty vector control (hereinafter NMC-empty vector, negative control).

[0888] NK cell mediated lysis of a retroviral vector is determined by europium release assays as described in Bouma, et al. Hum. Immunol. 35(2):85-92; 1992 & van Besouw et al. Transplantation 70(1):136-143; 2000. NK cells (hereinafter effector cells) are isolated from an appropriate donor according to the methods in Crop et al. Cell transplantation (20):1547-1559; 2011, and stimulated with allogeneic gamma irradiated PMBCs and 200 IU/mL IL-2 (proleukin, Chiron BV Amsterdam, The Netherlands) in a round bottom 96 well plate for 7 days at 37° C. The retroviral vectors are labeled with europium-diethylenetriaminepentaacetate (DTPA) (sigma, St. Louis, Mo., USA). Cytotoxicity-mediated lysis assays and data analsysis are performed as described above in Example 5.

[0889] In an embodiment, retroviral vectors generated from NMC-HLA-G cells will have a decreased percentage of lysis by target cells at specific timepoints as compared to retroviral vectors generated from NMCs or NMC-empty vector.

### Example 7. Modification of Retroviral Vector with HLA-G or HLA-E for Decreased CD8 Killer T Cell Lysis

[0890] This Example describes the generation of a retroviral vector composition derived from a cell source which has been modified to decrease cytotoxicity mediated cell lysis by CD8+ T-cells. In an embodiment, cytotoxicity mediated cell lysis of retroviral vector by CD8+ T-cells is a measure of immunogenicity for retroviral vectors.

[0891] Retroviral vectors are created from: unmodified cells (hereinafter NMCs, positive control), cells that are transfected with HLA-G or HLA-E cDNA (hereinafter NMC-HLA-G), and cells transfected with an empty vector control (hereinafter NMC-empty vector, negative control).

[0892] CD8+ T cell mediated lysis of a retroviral vector is determined by europium release assays as described in Bouma, et al. Hum. Immunol. 35(2):85-92; 1992 & van Besouw et al. Transplantation 70(1):136-143; 2000. CD8+ T-cells (hereinafter effector cells) are isolated from an appropriate donor according to the methods in Crop et al. Cell transplantation (20):1547-1559; 2011, and stimulated with allogeneic gamma irradiated PMBCs and 200 IU/mL IL-2 (proleukin, Chiron BV Amsterdam, The Netherlands) in a round bottom 96 well plate for 7 days at 37° C. The retroviral vectors are labeled with europium-diethylenetriaminepentaacetate (DTPA) (sigma, St. Louis, Mo., USA). Cytotoxicity-mediated lysis assays and data analsysis are performed as described above in Example 5.

[0893] In an embodiment, retroviral vectors generated from NMC-HLA-G cells will have a decreased percentage of lysis by target cells at specific timepoints as compared to retroviral vectors generated from NMCs or NMC-empty vector.

### Example 8: Modification of Retroviral Vector with CD47 to Evade Macrophage Phagocytosis

[0894] This Example describes quantification of the evasion of phagocytosis by modified retroviral vector. In an embodiment, modified retroviral vector will evade phagocytosis by macrophages.

[0895] Cells engage in phagocytosis, engulfing particles, enabling the sequestration and destruction of foreign invaders, like bacteria or dead cells. In some embodiments, phagocytosis of lentiviral vectors by macrophages would reduce their activity. In some embodiments, phagocytosis of lentiviral vectors is a measure of immunogenicity of retroviral vectors.

[0896] Retroviral vectors are produced from cells which lack CD47 (hereinafter NMC, positive control), cells that are transfected with CD47 cDNA (hereinafter NMC-CD47), and cells transfected with an empty vector control (hereinafter NMC-empty vector, negative control). Prior to retroviral vector production, the cells are labeled with CSFE.

[0897] Reduction of macrophage mediated immune clearance is determined with a phagocytosis assay according to the following protocol. Macrophages are plated immediately after harvest in confocal glass bottom dishes. Macrophages are incubated in DMEM+10% FBS+1% P/S for 1 h to attach. An appropriate number of retroviral vectors produced from NMC, NMC-CD47, NMC-empty vector are added to the macrophages as indicated in the protocol, and are incubated for 2 h, tools.thermofisher.com/content/sfs/manuals/mp06694.pdf.

[0898] After 2 h, the dish is gently washed and intracellular fluorescence is examined. Intracellular fluorescence emitted by engulfed retroviral particles is imaged by confocal microscopy at 488 excitation. The number of phagocytotic positive macrophage is quantified using imaging software. The data is expressed as the phagocytic index=(total number of engulfed cells/total number of counted macrophages)×(number of macrophages containing engulfed cells/total number of counted macrophages)×100.

[0899] In an embodiment, the phagocytic index will be reduced when macrophages are incubated with retroviral vectors derived from NMC-CD47, versus those derived from NMC, or NMC-empty vector.

### Example 9: Modification of Retroviral Vector with Complement Regulatory Proteins to Evade Complement

[0900] This Example describes quantification of complement activity against a retroviral vector using an in vitro assay. In some embodiments a modified retroviral vector described herein will have reduced complement activity compared to an unmodified retroviral vector.

[0901] In this Example, serum from a mouse is assessed for complement activity against a retroviral vector. The example measures the level of complement C3a, which is a central node in all complement pathways. The methods described herein may be equally applicable to humans, rats, monkeys with optimization to the protocol.

[0902] In this example, retroviral vectors are generated from HEK293 cells transfected with a cDNA coding for complement regulatory protein DAF (HEK293-DAF retroviral vector) or HEK 293 cells not expressing a complementary regulatory protein (HEK293 retroviral vector). In other embodiments, other complement regulatory proteins may be used, such as proteins that bind decay-accelerating factor (DAF, CD55), e.g. factor H (FH)-like protein-1 (FHL-1), e.g. C4b-binding protein (C4BP), e.g. complement receptor 1 (CD35), e.g. Membrane cofactor protein (MCP, CD46), eg. Profectin (CD59), e.g. proteins that inhibit the classical and alternative complement pathway CD/C5 convertase enzymes, e.g. proteins that regulate MAC assembly.

[0903] Serum is recovered from naïve mice, mice that are administered HEK293-DAF retroviral vector, or mice that are administered HEK293 retroviral vector. Sera are collected from mice by collecting fresh whole blood and allowing it to clot completely for several hours. Clots are pelleted by centrifugation and the serum supernatants are removed. A negative control is heat inactivated mouse serum. Negative control samples are heated at 56 degrees Celsius for 1 hour. Serum may be frozen in aliquots.

[0904] The different retroviral vectors are tested for the dose at which 50% of cells in a target cell population receive the exogenous agent in the retroviral vector. The retroviral vector may contain any of the exogenous agents described herein. Many methods for assaying retroviral delivery of an exogenous agent to recipient cells are also described herein. In this particular example, the exogenous agent is Cre protein (encoded by the retroviral nucleic acid) and the target cells are RPMI8226 cells which stably-express a “LoxP-GFP-stop-LoxP-RFP” cassette under a CMV promoter, which upon recombination by Cre switches from GFP to RFP expression, as a marker of delivery. The identified dose at which 50% of the recipient cells are RFP positive is used for further experiments. In some embodiments, the identified dose at which 50% of recipient cells receive the exogenous agent will be similar across retroviral vectors.

[0905] Two-fold dilutions in phosphate-buffered saline (PBS, pH 7.4) of the retroviral vectors, starting at the dose of retroviral vectors at which 50% of the target cells receive the exogenous agent, are mixed with a 1:10 dilution of the sera from mice treated with the same retroviral vectors or naïve mice (assay volume, 20 μl) and incubated for 1 h at 37° C. The samples are further diluted 1:500 and used in an enzyme-linked immunosorbent assay (ELISA) specific for C3a. The ELISA is mouse complement C3a ELISA Kit product LS-F4210 sold by LifeSpan BioSciences Inc, which measures the concentration of C3a in a sample. The dose of retroviral vector at which 200 pg/ml of C3a is present is compared across sera isolated from mice.

[0906] In some embodiments, the dose of retroviral vector at which 200 pg/ml of C3a is present will be greater for HEK293-DAF retroviral vector incubated with HEK-293 DAF mouse sera than for HEK293 retroviral vector incubated with HEK293 mouse sera, indicating that complement activity targeting retroviral vector is greater in mice treated with HEK293 retroviral vector than HEK293-DAF retroviral vector. In some embodiments, the dose of retroviral vector at which 200 pg/ml of C3a is present will be greater for HEK293-DAF retroviral vector incubated with naive mouse sera than for HEK293 retroviral vector incubated with naive mouse sera, indicating that complement activity targeting retroviral vector is greater in mice treated with HEK293 retroviral vector than HEK293-DAF retroviral vector.

### Example 10: Modification of Retroviral Vector to Knockdown Immunogenic Protein to Reduce Immunogenicity

[0907] This Example describes the generation of a retroviral vector composition derived from a cell source which has been modified to reduce expression of a molecule which is immunogenic, and quantification of the reduced expression. In an embodiment, a retroviral vector can be derived from a cell source, which has been modified to reduce expression of a molecule which is immunogenic.

[0908] Therapies that stimulate an immune response can reduce the therapeutic efficacy or cause toxicity to the recipient. Thus, immunogenicity is an important property for a safe and effective therapeutic retroviral vectors. Expression of certain immune activating agents can create an immune response. MHC class I represents one example of an immune activating agent.

[0909] Retroviral vectors are produced from unmodified cells which normally express MHC-1 (hereinafter NMC, positive control), cells that are transfected with a DNA coding for a shRNA targeting MHC class I (hereinafter NMC-shMHC class I), and cells transfected with a DNA coding for non-targeted scrambled shRNA vector control (hereinafter NMC-vector control, negative control). Prior to retroviral production, the cells are labeled with CSFE.

[0910] Retroviral vectors are assayed for expression of MHC class I using flow cytometry. An appropriate number of retroviral vectors are washed and resuspended in PBS, held on ice for 30 minutes with 1:10-1:4000 dilution of fluorescently conjugated monoclonal antibodies against MHC class I (Harlan Sera-Lab, Belton, UK). Retroviral vectors are washed three times in PBS and resuspended in PBS. Nonspecific fluorescence is determined, using equal aliquots of retroviral vector preparation incubated with and appropriate fluorescently conjugated isotype control antibody at equivalent dilutions. Retroviral vectors are assayed in a flow cytometer (FACSort, Becton-Dickinson) and the data is analyzed with flow analysis software (Becton-Dickinson).

[0911] The mean fluorescence data of the retroviral vectors derived from NMCs, NMC-shMHC class I, and NMC-vector control, is compared. In an embodiment, retroviral vectors derived from NMC-shMHC class I will have lower expression of MHC class I compared to NMCs and NMC-vector control.

### Example 11: Measuring Pre-Existing Serum Inactivation of Retroviral Vectors

[0912] This Example describes quantification of pre-existing serum inactivation of retroviral vectors using an in vitro delivery assay.

[0913] In some embodiments, a measure of immunogenicity for retroviral vectors is serum inactivation. Serum inactivation of retroviral vectors may be due to antibody-mediated neutralization or complement mediated degradation. In an embodiment, some recipients of a retroviral vectors described herein will have factors in their serum which bind to and inactivate retroviral vectors.

[0914] In this Example, a retroviral vector naïve mouse is assessed for the presence of factors that inactivate retroviral vectors in serum. Notably, the methods described herein may be equally applicable to humans, rats, monkeys with optimization to the protocol.

[0915] The negative control is heat inactivated mouse serum and the positive control is serum derived from a mouse that has received multiple injections of retroviral vector generated from a xenogeneic source cell. Sera are collected from mice by collecting fresh whole blood and allowing it to clot completely for several hours. Clots are pelleted by centrifugation and the serum supernatants are removed. Negative control samples are heated at 56 degrees Celsius for 1 hour. Serum may be frozen in aliquots.

[0916] The retroviral vectors are tested for the dose at which 50% of cells in a target cell population receive the exogenous agent in the retroviral vector, as described above in Example 9.

[0917] To assess serum inactivation of retroviral vectors, retroviral vectors are diluted 1:5 into normal or heat-inactivated serum (or medium containing 10% heat-inactivated FBS as the no-serum control) and the mixture is incubated at 37° C. for 1 h. Following the incubation, medium is added to the reaction for an additional 1:5 dilution and then serially diluted twice at a 1:10 ratio. Following this step, the retroviral vectors should be present at the previously identified dose at which 50% of the recipient cells have received the exogenous agent (e.g. are RFP positive).

[0918] Retroviral vectors that have been exposed to serum are then incubated with target cells. The percent of cells which receive the exogenous agent, and thus are RFP positive, is calculated. In some embodiments, the percent of cells which receive the exogenous agent will not be different between retroviral vector samples that have been incubated with serum and heat-inactivated serum from retroviral vector naïve mice, indicating that there is not serum inactivation of retroviral vector. In some embodiments, the percent of cells which receive the exogenous agent will not be different between retroviral vector samples that have been incubated with serum from retroviral vector naïve mice and no-serum control incubations, indicating that there is not serum inactivation of retroviral vectors. In some embodiments, the percent of cells which receive the exogenous agent will be less in retroviral vector samples that have been incubated with positive control serum than in retroviral vector samples that have been incubated with serum from retroviral vector naïve mice, indicating that there is not serum inactivation of retroviral vectors.

### Example 12: Measuring Serum Inactivation of Retroviral Vectors after Multiple Administrations

[0919] This Example describes quantification of serum inactivation of retroviral vectors using an in vitro delivery assay following multiple administrations of the retroviral vectors. In an embodiment, a modified retroviral vector, e.g., modified by a method described herein, will have a reduced (e.g., reduced compared to administration of an unmodified retroviral vector) serum inactivation following multiple (e.g., more than one, e.g., 2 or more) administrations of the modified retroviral vector. In an embodiment, a retroviral vector described herein will not be inactivated by serum following multiple administrations.

[0920] In some embodiments, a measure of immunogenicity for retroviral vector is serum inactivation. In an embodiment, repeated injections of a retroviral vector can lead to the development of anti-retroviral vector antibodies, e.g., antibodies that recognize retroviral vectors. In an embodiment, antibodies that recognize retroviral vectors can bind in a manner that can limit retroviral vector activity or longevity and mediate complement degradation.

[0921] In this Example, serum inactivation is examined after one or more administrations of retroviral vectors. Retroviral vectors are produced by any one of the previous Examples. In this example, retroviral are created from: cells that are transfected with HLA-G or HLA-E cDNA (hereinafter NMC-HLA-G), and cells transfected with an empty vector control (hereinafter NMC-empty vector, negative control). In some embodiments, retroviral vectors are derived from cells that are expressing other immunoregulatory proteins.

[0922] Serum is drawn from different cohorts: mice injected systemically and/or locally with 1, 2, 3, 5, or 10 injections of vehicle (retroviral vector naïve group), HEK293-HLA-G retroviral vector, or HEK293 retroviral vector. Sera are collected from mice by collecting fresh whole blood and allowing it to clot completely for several hours. Clots are pelleted by centrifugation and the serum supernatants are removed. A negative control is heat inactivated mouse serum. Negative control samples are heated at 56 degrees Celsius for 1 hour. Serum may be frozen in aliquots.

[0923] The retroviral vectors are tested for the dose at which 50% of cells in a target cell population receive the exogenous agent in the retroviral vector, as described above in Example 9.

[0924] To assess serum inactivation of retroviral vectors, retroviral vectors are exposed to serum and incubated with target cells as described in Example 11 above.

[0925] The percent of cells which receive the exogenous agent, and thus are RFP positive, is calculated. In some embodiments, the percent of cells which receive the exogenous agent will not be different between retroviral vector samples that have been incubated with serum and heat-inactivated serum from mice treated with HEK293-HLA-G retroviral vectors, indicating that there is not serum inactivation of retroviral vectors or an adaptive immune response. In some embodiments, the percent of cells which receive the exogenous agent will not be different between retroviral vector samples that have been incubated from mice treated 1, 2, 3, 5 or 10 times with HEK293-HLA-G retroviral vectors, indicating that there is not serum inactivation of retroviral vectors or an adaptive immune response. In some embodiments, the percent of cells which receive the exogenous agent will not be different between retroviral vector samples that have been incubated with serum from mice treated with vehicle and from mice treated with HEK293-HLA-G retroviral vectors, indicating that there is not serum inactivation of retroviral vectors or an adaptive immune response. In some embodiments, the percent of cells which receive the exogenous agent will be less for retroviral vectors derived from HEK293 than for HEK293-HLA-G retroviral vectors indicating that there is not serum inactivation of HEK293-HLA-G retroviral vectors or an adaptive immune response.

### Example 13: Measuring Pre-Existing IgG and IgM Antibodies Reactive against Retroviral Vectors

[0926] This Example describes quantification of pre-existing anti-retroviral vector antibody titers measured using flow cytometry.

[0927] In some embodiments, a measure of immunogenicity for a retroviral vector is antibody responses. Antibodies that recognize retroviral vector can bind in a manner that can limit retroviral vector activity or longevity. In an embodiment, some recipients of a retroviral vector described herein will have pre-existing antibodies which bind to and recognize retroviral vector.

[0928] In this Example, anti-retroviral vector antibody titers are tested using retroviral vector produced using a xenogeneic source cell. In this Example, a retroviral vector naïve mouse is assessed for the presence of anti-retroviral vector antibodies. Notably, the methods described herein may be equally applicable to humans, rats, monkeys with optimization to the protocol.

[0929] The negative control is mouse serum which has been depleted of IgM and IgG, and the positive control is serum derived from a mouse that has received multiple injections of retroviral vector generated from a xenogeneic source cell.

[0930] To assess the presence of pre-existing antibodies which bind to retroviral vector, sera from retroviral vector-naïve mice is first decomplemented by heating to 56° C. for 30 min and subsequently diluted by 33% in PBS containing 3% FCS and 0.1% NaN3. Equal amounts of sera and retroviral vector (1×10²-1×10⁸ retroviral vectors per mL) suspensions are incubated for 30 min at 4° C. and washed with PBS through a calf-serum cushion.

[0931] IgM xenoreactive antibodies are stained by incubation of the retroviral vector with PE-conjugated goat antibodies specific for the Fc portion of mouse IgM (BD Bioscience) at 4° C. for 45 min. Notably, anti-mouse IgG1 or IgG2 secondary antibodies may also be used. Retroviral vector from all groups are washed twice with PBS containing 2% FCS and then analyzed on a FACS system (BD Biosciences). Fluorescence data are collected by use of logarithmic amplification and expressed as mean fluorescent intensity.

[0932] In an embodiment, the negative control serum will show negligible fluorescence comparable to the no serum or secondary alone controls. In an embodiment, the positive control will show more fluorescence than the negative control, and more than the no serum or secondary alone controls. In an embodiment, in cases where immunogenicity occurs, serum from retroviral vector-naïve mice will show more fluorescence than the negative control. In an embodiment, in cases where immunogenicity does not occur, serum from retroviral vector -naïve mice will show similar fluorescence compared to the negative control.

### Example 14: Measuring IgG and IgM Antibody Responses after Multiple Administrations of Retroviral Vectors

[0933] This Example describes quantification of the humoral response of a modified retroviral vector following multiple administrations of the modified retroviral vector. In an embodiment, a modified retroviral vector, e.g., modified by a method described herein, will have a reduced (e.g., reduced compared to administration of an unmodified retroviral vector) humoral response following multiple (e.g., more than one, e.g., 2 or more), administrations of the modified retroviral vector.

[0934] In some embodiments, a measure of immunogenicity for a retroviral vector is the antibody responses. In an embodiment, repeated injections of a retroviral vector can lead to the development of anti-retroviral vector antibodies, e.g., antibodies that recognize retroviral vector. In an embodiment, antibodies that recognize retroviral vector can bind in a manner that can limit retroviral vector activity or longevity.

[0935] In this Example, anti-retroviral vector antibody titers are examined after one or more administrations of retroviral vector. Retroviral vector is produced by any one of the previous Examples. In this example, retroviral are created from: cells that are not transfected with an immunomodulatory protein (NMCs), cells that are transfected with HLA-G or HLA-E cDNA (hereinafter NMC-HLA-G), and cells transfected with an empty vector control (hereinafter NMC-empty vector, negative control). In some embodiments, retroviral vectors are derived from cells that are expressing other immunoregulatory proteins.

[0936] Serum is drawn from different cohorts: mice injected systemically and/or locally with 1, 2, 3, 5, 10 injections of vehicle (retroviral vector naïve group), NMC retroviral vector, NMC-HLA-G retroviral vector, or NMC-empty vectors retroviral vector.

[0937] To assess the presence and abundance of anti-retroviral vector antibodies, sera from the mice is first decomplemented by heating to 56° C. for 30 min and subsequently diluted by 33% in PBS with 3% FCS and 0.1% NaN3. Equal amounts of sera and retroviral vector (1×10²-1×10⁸ retroviral vector per mL) are incubated for 30 min at 4° C. and washed with PBS through a calf-serum cushion.

[0938] Retroviral vector reactive IgM antibodies are stained by incubation of the retroviral vector with PE-conjugated goat antibodies specific for the Fc portion of mouse IgM (BD Bioscience) at 4° C. for 45 min. Notably, anti-mouse IgG1 or IgG2 secondary antibodies may also be used. Retroviral vector from all groups are washed twice with PBS containing 2% FCS and then analyzed on a FACS system (BD Biosciences). Fluorescence data are collected by use of logarithmic amplification and expressed as mean fluorescent intensity.

[0939] In an embodiment, NMC-HLA-G retroviral vectors will have decreased anti-viral IgM (or IgG1/2) antibody titers (as measured by fluorescence intensity on FACS) after injections, as compared to NMC retroviral vectors or NMC-empty retroviral vectors.

### Example 15: Measuring IgG and IgM Titers Antibody Responses to Retroviral Vector Recipient Cells

[0940] This Example describes quantification of antibody titers against recipient cells (cells that have fused with retroviral vectors) using flow cytometry. In some embodiments, a measure of the immunogenicity of recipient cells is the antibody response. Antibodies that recognize recipient cells can bind in a manner that can limit cell activity or longevity. In an embodiment, recipient cells will not be targeted by an antibody response, or an antibody response will be below a reference level.

[0941] In this Example, anti-recipient cell antibody titers in a subject (e.g., human, rat, or monkey) are tested. In addition, the protocol may be adapted to any cell type for which suitable surface markers exist. In this example, the target recipient cell is a CD3+ cell.

[0942] Mice are treated with retroviral vectors produced via any of the methods described in this application or with PBS (negative control) daily for 5 days. 28 days following the final treatment, peripheral blood is collected from mice that received retroviral vectors and mice that received PBS treatment. Blood is collected into 1 ml PBS containing 5 μM EDTA and mixed immediately to prevent clotting. The tubes are kept on ice and red blood cells are removed using a buffered ammonium chloride (ACK) solution. Cells are stained with a murine CD3-FITC antibody (Thermo Fisher Catalog #:11-0032-82), at 4° C. for 30 minutes in the dark, after being blocked with bovine serum albumin for 10 minutes. After being washed two times with PBS, cells are analyzed on a LSR II (BD Biosciences, San Jose, Calif.) with 488 nm laser excitation and emission collected at 530+/−30 nm running the FACSDiva™ software (BD Biosciences, San Jose, Calif.). CD3+ cells are sorted.

[0943] The sorted CD3+ cells are then stained with IgM antibodies by incubation of the reaction mixture with PE-conjugated goat antibodies specific for the Fc portion of mouse IgM (BD Bioscience) at 4° C. for 45 min. Notably, anti-mouse IgG1 or IgG2 secondary antibodies may also be used. Cells from all groups are washed twice with PBS containing 2% FCS and then analyzed on a FACS system (BD Biosciences). Fluorescence data are collected by use of logarithmic amplification and expressed as mean fluorescent intensity. The mean fluorescence intensity is calculated for the sorted CD3 cells from mice treated with retroviral vectors and the mice treated with PBS.

[0944] A low mean fluorescence intensity is indicative of a low humoral response against the recipient cells. Mice treated with PBS are expected to have low mean fluorescence intensity. In an embodiment, the mean fluorescence intensity will be similar for recipient cells from mice treated with retroviral vectors and mice treated with PBS.

### Example 16: Measuring Phagocytic Response to Retroviral Vector Recipient Cells

[0945] This Example describes quantification of macrophage response against recipient cells with a phagocytosis assay.

[0946] In some embodiments, a measure of the immunogenicity of recipient cells is the macrophage response. Macrophages engage in phagocytosis, engulfing cells and enabling the sequestration and destruction of foreign invaders, like bacteria or dead cells. In some embodiments, phagocytosis of recipient cells by macrophages would reduce their activity.

[0947] In an embodiment, recipient cells are not targeted by macrophages. In this Example, the macrophage response against recipient cells in a subject is tested. In addition, the protocol may be adapted to any cell type for which suitable surface markers exist. In this example, the target recipient cell is a CD3+ cell.

[0948] Mice are treated with retroviral vectors produced via any of the methods described in this application or with PBS (negative control) daily for 5 days. 28 days following the final treatment, peripheral blood is collected from mice that received retroviral vectors and mice that received PBS treatment. Blood is collected into 1 ml PBS containing 5 μM EDTA and mixed immediately to prevent clotting. The tubes are kept on ice and red blood cells are removed using a buffered ammonium chloride (ACK) solution.

[0949] Cells are stained with a murine CD3-FITC antibody (Thermo Fisher Catalog #:11-0032-82), at 4° C. for 30 minutes in the dark, after being blocked with bovine serum albumin for 10 minutes. After being washed two times with PBS, cells are analyzed on a LSR II (BD Biosciences, San Jose, Calif.) with 488 nm laser excitation and emission collected at 530+/−30 nm running the FACSDiva™ software (BD Biosciences, San Jose, Calif.). CD3+ cells are then sorted.

[0950] A phagocytosis assay is run to assess macrophage mediated immune clearance according to the following protocol. Macrophages are plated immediately after harvest in confocal glass bottom dishes. Macrophages are incubated in DMEM+10% FBS+1% P/S for 1 h to attach. An appropriate number of sorted and FITC-stained CD3+ cells derived from mice that received retroviral vectors and PBS are added to the macrophages as indicated in the protocol, and are incubated for 2 h, e.g., as described in the Vybrant™ Phagocytosis Assay Kit product information insert (Molecular Probes, revised 18 Mar. 2001, found at tools.thermofisher.com/content/sfs/manuals/mp06694.pdf).

[0951] After 2 h, the dish is gently washed and intracellular fluorescence is examined. To identify macrophages, cells are first incubated with Fc-receptor blocking antibody (eBioscence cat. no. 14-0161-86, clone 93) for 15 min on ice to block the binding of labeled mAbs to Fc receptors, which are abundantly expressed on macrophages. Following this step anti-F4/80-PE (ThermoFisher cat. No. 12-4801-82, clone BM8) and anti-CD11b-PerCP-Cy5.5 (BD Biosciences cat. No. 550993, clone M1/70) conjugated antibodies are added to stain macrophage surface antigens. Cells are incubated for 30 min in the dark at 4 C followed by centrifugation and washing in PBS. The cells are then resuspended in PBS. Flow cytometry of samples is then performed and macrophages are identified via positive fluorescence signal for F4/80-PE and CD11b-PerCP-Cy5.5 using 533 nm and 647 nm laser excitation, respectively. After gating for macrophages, intracellular fluorescence emitted by engulfed recipient cells is assessed by 488 nm laser excitation. The number of phagocytotic positive macrophage is quantified using imaging software. The data is expressed as the phagocytic index=(total number of engulfed cells/total number of counted macrophages)×(number of macrophages containing engulfed cells/total number of counted macrophages)×100.

[0952] A low phagocytic index is indicative of low phagocytosis and targeting by macrophages. Mice treated with PBS are expected to have a low phagocytic index. In an embodiment, the phagocytic index will be similar for recipient cells derived from mice treated with retroviral vectors and mice treated with PBS.

### Example 17: Measuring PBMC Response to Retroviral Vector Recipient Cells

[0953] This Example describes quantification of a PBMC response against recipient cells with a cell lysis assay.

[0954] In some embodiments, a measure of the immunogenicity of recipient cells is the PBMC response. In an embodiment, cytotoxicity mediated cell lysis of recipient cells by PBMCs is a measure of immunogenicity, as lysis will reduce, e.g., inhibit or stop, the activity of a retroviral vector.

[0955] In an embodiment, recipient cells do not elicit a PBMC response. In this Example, the PBMC response against recipient cells in a subject is tested.

[0956] In addition, the protocol may be adapted to any cell type for which suitable surface markers exist. In this example, the target recipient cell is a CD3+ cell.

[0957] Mice are treated with retroviral vector produced via any of the methods described in this application or with PBS (negative control) daily for 5 days. 28 days following the final treatment, peripheral blood is collected from mice that received retroviral vector and mice that received PBS treatment. Blood is collected into 1 ml PBS containing 5 μM EDTA and mixed immediately to prevent clotting. The tubes are kept on ice and red blood cells are removed using a buffered ammonium chloride (ACK) solution. Cells are stained with a murine CD3:APC-Cy7 antibody (Biolgend Catalog #: 100330) or an isotype control APC-Cy7 (IC:APC-Cy7) antibody (Biolgend Catalog #: 400230) at 4° C. for 30 minutes in the dark, after being Fc blocked (Biolgend Catalog #: 101319) in cell staining buffer (Biolgend Catalog #: 420201) for 10 minutes. After being washed two times with PBS, cells are analyzed on a FACS Aria (BD Biosciences, San Jose, Calif.) with 640 nm laser excitation and emission collected at 780−/+60 nm running the FACSDiva™ software (BD Biosciences, San Jose, Calif.) to set negative gates using the isotype control APC-Cy7 antibody labelled cells and then APC-Cy7 positive cells are sorted and collected. Sorted CD3+ cells are then labelled with either CellMask™ Green Plasma membrane Stain (CMG, ThermoFisher Catalog #: C37608) or DMSO as the negative control.

[0958] 7 days prior to the isolation of CD3+ cells from the mice treated with retroviral vector or PBS, PBMCs are isolated from mice treated with retroviral vector or PBS according to the methods in Crop et al. Cell transplantation (20):1547-1559; 2011 and simulated in the presence of IL-2 recombinant mouse protein (R&D Systems Catalog #: 402-ML-020) and CD3/CD28 beads (ThermoFisher Catalog #: 11456D) in a round bottom 96 well plate for 7 days at 37 C. At day 7, the stimulated PBMCs are co-incubated with CD3+/CMG+ or CD3+/DMSO control cells for 1, 2, 3, 4, 5, 6, 8, 10, 15, 20, 24, 48 hours at a plating ratio of PBMC:CD3+/CMG+ or PBMC: CD3+/DMSO control cells ranging from 1000:1-1:1 and 1:1.25-1:1000. As a negative control a set of wells would receive CD3+/CMG+ and CD3+/DMSO control cells only, no PBMCs. After incubation, the plates are centrifuged and processed so that they are labelled with either murine CD3:APC-Cy7 antibody or an IC:APC-Cy7 antibody as per above. After being washed two times with PBS, cells are re-suspended in PBS and analyzed on a FACS Aria (APC-Cy7: 640 nm laser excitation/emission collected at 780−/+60 nm and CMG 561 nm laser excitation/emission collected at 585−/+16 nm) running the FACSDiva™ software (BD Biosciences, San Jose, Calif.). The FSC/SSC event data would then be used initially to set the gate for events labelled “cells”. This “cells” gate would be then used to display events to set the PMT voltage for the the 640 nm and 561 nm laser analyzing samples labelled with IC:APC-Cy7/DMSO only. This sample would also be used to set the gates for negative cells for both APC-Cy7 and CMG. The CD3+/CMG+ cells that did not receive any PBMCs would then used to set the positive gates for CD3+ and CMG+ cells.

[0959] The data is analyzed by looking at the percentage of CD3+/CMG+ cells in the population of total cells. When comparing treatment groups, a relatively lower percentage of CD3+/CMG+ cells at any given assay ratio of PBMC:CD3+/CMG+ cells is indicative of recipient cell lysis. In an embodiment, the percent of CD3+/CMG+ will be similar for recipient cells derived from mice treated with retroviral vector and mice treated with PBS.

### Example 18: Measuring NK Cell Response to Retroviral Vector Recipient Cells

[0960] This Example describes quantification of a natural killer cell response against recipient cells with a cell lysis assay.

[0961] In some embodiments, a measure of the immunogenicity of recipient cells is the natural killer cell response. In an embodiment, cytotoxicity mediated cell lysis of recipient cells by natural killer cells is a measure of immunogenicity, as lysis will reduce, e.g., inhibit or stop, the activity of a retroviral vector.

[0962] In an embodiment, recipient cells do not elicit a natural killer cell response. In this Example, the natural killer response against recipient cells in a subject is tested. In addition, the protocol may be adapted to any cell type for which suitable surface markers exist. In this example, the target recipient cell is a CD3+ cell.

[0963] Mice are treated with retroviral vector, a blood sample is drawn, and CD3+ cells are sorted as described above in Example 17. NK cells are isolated, cultured with the CD3+ cells, and analyzed by FACS according to the protocol described above in Example 17 except that NK cells are used in place of the PBMC cells used in Example 17.

[0964] The data is analyzed by looking at the percentage of CD3+/CMG+ cells in the population of total cells. When comparing treatment groups, a relatively lower percentage of CD3+/CMG+ cells at any given assay ratio of NK cells:CD3+/CMG+ cells is indicative of recipient cell lysis. In an embodiment, the percent of CD3+/CMG+ will be similar for recipient cells derived from mice treated with retroviral vector and mice treated with PBS.

### Example 19: Measuring CD8 T Cell Response to Retroviral Vector Recipient Cells

[0965] This Example describes quantification of a CD8+ T cell response against recipient cells (cells that have fused with retroviral vectors) with a cell lysis assay.

[0966] In some embodiments, a measure of the immunogenicity of recipient cells is the CD8+ T cell response. In an embodiment, cytotoxicity mediated cell lysis of recipient cells by CD8+ T cells is a measure of immunogenicity, as lysis will reduce, e.g., inhibit or stop, the activity of a retroviral vector.

[0967] In an embodiment, recipient cells do not elicit a CD8+ T cell response. In this Example, the CD8+ T cell response against recipient cells in a subject is tested. In addition, the protocol may be adapted to any cell type for which suitable surface markers exist. In this example, the target recipient cell is a CD3+ cell.

[0968] Mice are treated with retroviral vector, a blood sample is drawn, and CD3+ cells are sorted as described above in Example 17. CD8+ T cells are isolated, cultured with the CD3+ cells, and analyzed by FACS according to the protocol described above in Example 17 except that CD8+ T cells are used in place of the PBMC cells used in Example 17.

[0969] The data is analyzed by looking at the percentage of CD3+/CMG+ cells in the population of total cells. When comparing treatment groups, a relatively lower percentage of CD3+/CMG+ cells at any given assay ratio of CD8+ cells:CD3+/CMG+ cells is indicative of recipient cell lysis. In an embodiment, the percent of CD3+/CMG+ will be similar for recipient cells derived from mice treated with retroviral vectors and mice treated with PBS.

### Example 20: Measuring CNS Cell-Specific Promoter Activity

[0970] This Example describes the measurement of the activity of a CNS cell-specific promoter (a positive TCSRE) in CNS cells compared to non-target cells.

[0971] The two cell types are cultured separately and treated with a retroviral vector produced as described herein. The retroviral vector is pseudotyped with a VSV-G and codes for tdtomato fluorescent protein reporter under the control of a CNS cell-specific promoter, e.g., a CNS cell-specific promoter of Table 3.

[0972] Two days after transduction, gene expression in the cells is measured via flow cytometry and the average vector copy number in the cells is measured with quantitative PCR. The median tdtomato gene expression per cell in the cell population is normalized to the population vector copy number.

[0973] In some embodiments, the population of CNS cells will have a greater ratio of tdtomato expression to vector copy number than the population of non-target cells. This will demonstrate that the CNS cell-specific promoter is more active in CNS cells.

### Example 21: Measuring Change in Expression from Restrictive microRNA

[0974] This Example describes the measurement of the activity of a non-target-cell-restrictive microRNA (a NTCSRE) in CNS cells compared to non-target cells.

[0975] The two cell types are cultured separately and treated with a retroviral vector produced as described herein. The retroviral vector is pseudotyped with a VSV-G and codes for tdtomato fluorescent protein reporter under the control of a ubiquitously active promoter and a non-target-cell-restrictive microRNA, e.g., a microRNA of Table 4.

[0976] Two days after transduction, gene expression in the cells is measured via flow cytometry and the average vector copy number in the cells is measured with quantitative PCR. The median tdtomato gene expression per cell in the cell population is normalized to the population vector copy number.

[0977] In some embodiments, the population of CNS cells will have a greater ratio of tdtomato expression to vector copy number than the population of non-target cells. This will demonstrate that the non-target-cell restrictive microRNA decreases expression in non-target cells.

### Example 22: Treatment for Friedreich's Ataxia with VSV-G Pseudotype In Vitro

[0978] This example describes delivery of a therapeutic transgene to cells in vitro. In this example, the therapeutic transgene is frataxin (fxn).

[0979] Neurons are cultured from brains of YG8R mice and transduced with a retroviral vector produced as described herein or with PBS. The retroviral vector is pseudotyped with VSV-G and carries the fxn gene under the control of a neuronal-specific promoter (a positive TCSRE) and microglial cell restrictive microRNA sequence (a NTCSRE).

[0980] Following sufficient time for Fxn expression, the cells are prepared for imaging. The cells are fixed, permeabilized, blocked, and immunostained with an anti-Fxn antibody (for example, abcam catalog number ab175402). Following immunostaining, the cells are counterstained with a secondary antibody conjugated to Alexa Fluor 488 (for example, abcam catalog number ab150077). The cells are imaged on a Zeiss LSM 710 confocal microscope with a 63× oil immersion objective while maintained at 37 C and 5% CO₂. Alexa Fluor is subjected to 488 nm laser excitation and emission captured at 510±15 nm. The Alexa Flour average intensity per cell is calculated to determine the level of Fxn expression per cell. For each group at least 30-40 cells are imaged and analyzed.

[0981] In some embodiments, the level of Fxn expression per cell will be higher in neurons treated with the retroviral vector encoding the Fxn gene than in neurons treated with PBS.

### Example 23: Treatment for Friedreich's Ataxia with VSV-G Pseudotyped Retrovirus In Vivo

[0982] This example describes delivery of a therapeutic transgene to cells in vivo. In this example, the therapeutic transgene is frataxin (fxn).

[0983] YG8R mice are injected intracerebellarly with retroviral vector pseudotyped with VSV-G and carrying the fxn gene agent under the control of a neuronal-specific promoter (a positive TCSRE) and microglial cell restrictive microRNA sequence (a NTCSRE). The retroviral vector is produced via any of the methods described in this application. Negative control mice are treated with PBS.

[0984] 28 days following treatment, brain slices are obtained from mice treated with retrovirus or PBS and stained for Fxn expression as described in previous examples. In some embodiments, the level of Fxn expression per cell will be higher in brains from mice treated with the retroviral vector encoding the Fxn gene than in brains of mice treated with PBS.

[0985] In a separate group of mice, 28 days after treatment with retrovirus or PBS the mice are subjected to neurobehavioral tests as described in Rocca et al., 2017, Sci. Transl. Med. 9(413), doi: 10.1126/scitranslmed.aaj2347. In some embodiments, mice treated with retrovirus display significant improvement in neurobehavioral testing as compared to mice treated with PBS.

### Example 24: Lack of Transcriptional Activity in Fusosomes

[0986] This Example quantifies transcriptional activity in fusosomes compared to parent cells, e.g., source cells, used for fusosome generation. In an embodiment, transcriptional activity will be low or absent in fusosomes compared to the parent cells, e.g., source cells.

[0987] Fusosomes are a chassis for the delivery of therapeutic agent. Therapeutic agents, such as miRNA, mRNAs, proteins and/or organelles that can be delivered to cells or local tissue environments with high efficiency could be used to modulate pathways that are not normally active or active at pathological low or high levels in recipient tissue. In an embodiment, the observation that fusosomes are not capable of transcription, or that fusosomes have transcriptional activity of less than their parent cell, will demonstrate that removal of nuclear material has sufficiently occurred.

[0988] Fusosomes are prepared by any one of the methods described in previous Examples. A sufficient number of fusosomes and parent cells used to generate the fusosomes are then plated into a 6 well low-attachment multiwell plate in DMEM containing 20% Fetal Bovine Serum, 1× Penicillin/Streptomycin and the fluorescent-taggable alkyne-nucleoside EU for 1 hr at 37° C. and 5% CO2. For negative controls, a sufficient number of fusosomes and parent cells are also plated in multiwell plate in DMEM containing 20% Fetal Bovine Serum, 1× Penicillin/Streptomycin but with no alkyne-nucleoside EU.

[0989] After the 1 hour incubation the samples are processed following the manufacturer's instructions for an imaging kit (ThermoFisher Scientific). The cell and fusosome samples including the negative controls are washed thrice with 1× PBS buffer and resuspended in 1× PBS buffer and analyzed by flow cytometry (Becton Dickinson, San Jose, Calif., USA) using a 488 nm argon laser for excitation, and the 530+/−30 nm emission. BD FACSDiva software was used for acquisition and analysis. The light scatter channels are set on linear gains, and the fluorescence channels on a logarithmic scale, with a minimum of 10,000 cells analyzed in each condition.

[0990] In an embodiment, transcriptional activity as measured by 530+/−30 nm emission in the negative controls will be null due to the omission of the alkyne-nucleoside EU. In some embodiments, the fusosomes will have less than about 70%, 60%, 50%, 40%, 30%, 20%, 10%, 5%, 4%, 3%, 2%, 1% or less transcriptional activity than the parental cells.

[0991] See also, Proc Natl Acad Sci U S A, 2008, Oct. 14;105(41):15779-84. doi: 10.1073/pnas.0808480105. Epub 2008 Oct. 7.

### Example 25: Lack of DNA Replication or Replication Activity

[0992] This Example quantifies DNA replication in fusosomes. In an embodiment, fusosomes will replicate DNA at a low rate compared to cells.

[0993] Fusosomes are prepared by any one of the methods described in previous Examples. Fusosome and parental cell DNA replication activity is assessed by incorporation of a fluorescent-taggable nucleotide (ThermoFisher Scientific #C10632). Fusosomes and an equivalent number of cells are incubated with EdU at a final concentration of 10 μM for 2 hr, after preparation of an EdU stock solution with in dimethylsulfoxide. The samples are then fixed for 15 min using 3.7% PFA, washed with 1× PBS buffer, pH 7.4 and permeabilized for 15 min in 0.5% detergent solution in 1× PBS buffer, pH 7.4.

[0994] After permeabilization, fusosomes and cells in suspension in PBS buffer containing 0.5% detergent are washed with 1× PBS buffer, pH 7.4 and incubated for 30 min at 21° C. in reaction cocktail, 1× PBS buffer, CuSO4 (Component F), azide-fluor 488, 1× reaction buffer additive.

[0995] A negative control for fusosome and cell DNA replication activity is made with samples treated the same as above but with no azide-fluor 488 in the 1× reaction cocktail.

[0996] The cell and fusosome samples are then washed and resuspended in 1× PBS buffer and analyzed by flow cytometry. Flow cytometry is done with a FACS cytometer (Becton Dickinson, San Jose, Calif., USA) with 488 nm argon laser excitation, and a 530+/−30 nm emission spectrum is collected. FACS analysis software is used for acquisition and analysis. The light scatter channels are set on linear gains, and the fluorescence channels on a logarithmic scale, with a minimum of 10,000 cells analyzed in each condition. The relative DNA replication activity is calculated based on the median intensity of azide-fluor 488 in each sample. All events are captured in the forward and side scatter channels (alternatively, a gate can be applied to select only the fusosome population). The normalized fluorescence intensity value for the fusosomes is determined by subtracting from the median fluorescence intensity value of the fusosome the median fluorescence intensity value of the respective negative control sample. Then the normalized relative DNA replication activity for the fusosomes samples is normalized to the respective nucleated cell samples in order to generate quantitative measurements for DNA replication activity.

[0997] In an embodiment, fusosomes have less DNA replication activity than parental cells.

[0998] See, also, Salic, 2415-2420, doi: 10.1073/pnas.0712168105.

### Example 26: Quantification of Fusogens

[0999] This example describes quantification of the absolute number of fusogens per fusosome.

[1000] A fusosome composition is produced by any one of the methods described in the previous Examples, except the fusosome is engineered as described in a previous Example to express a fusogen (VSV-G) tagged with GFP. In addition, a negative control fusosome is engineered with no fusogen (VSV-G) or GFP present.

[1001] The fusosomes with the GFP-tagged fusogen and the negative control(s) are then assayed for the absolute number of fusogens as follows. Commercially acquired recombinant GFP is serially diluted to generate a calibration curve of protein concentration. The GFP fluorescence of the calibration curve and a sample of fusosomes of known quantity is then measured in a fluorimeter using a GFP light cube (469/35 excitation filter and a 525/39 emission filter) to calculate the average molar concentration of GFP molecules in the fusosome preparation. The molar concentration is then converted to the number of GFP molecules and divided by the number of fusosomes per sample to achieve an average number of GFP-tagged fusogen molecules per fusosome and thus provides a relative estimate of the number of fusogens per fusosome.

[1002] In an embodiment, GFP fluorescence will be higher in the fusosomes with GFP tag as compared to the negative controls, where no fusogen or GFP is present. In an embodiment, GFP fluorescence is relative to the number of fusogen molecules present.

[1003] Alternatively, individual fusosomes are isolated using a single cell prep system (Fluidigm) per manufacturer's instructions, and qRT-PCR is performed using a commercially available probeset (Taqman) and master mix designed to quantify fusogen or GFP cDNA levels based upon the Cₜ value. A RNA standard of the same sequence as the cloned fragment of the fusogen gene or the GFP gene is generated by synthesis (Amsbio) and then added to single cell prep system qRT-PCR experimental reaction in serial dilutions to establish a standard curve of Cₜ vs concentration of fusogen or GFP RNA.

[1004] The Cₜ value from fusosomes is compared to the standard curve to determine the amount of fusogen or GFP RNA per fusosome.

[1005] In an embodiment, fusogen and GFP RNA will be higher in the fusosomes with engineered to express the fusogens as compared to the negative controls, where no fusogen or GFP is present.

[1006] Fusogens may further be quantified in the lipid bilayer by analyzing the lipid bilayer structure as previously described and quantifying fusogens in the lipid bilayer by LC-MS as described in other Examples herein.

### Example 27: Measuring the Average Size of Fusosomes

[1007] This Example describes measurement of the average size of fusosomes.

[1008] Fusosomes are prepared by any one of the methods described in previous Examples. The fusosomes measured to determine the average size using commercially available systems (iZON Science). The system is used with software according to manufacturer's instructions and a nanopore designed to analyze particles within the 40 nm to 10 μm size range. Fusosomes and parental cells are resuspended in phosphate-buffered saline (PBS) to a final concentration range of 0.01-0.1 μg protein/mL. Other instrument settings are adjusted as indicated in the following table:

TABLE 7
Fusosome measurement parameters and settings

| Measurement Parameter | Setting |
|---|---|
| Pressure | 6 |
| Nanopore type | NP300 |
| Calibration sample | CPC400_6P |
| Gold standard analysis | no |
| Capture assistant | none |

[1009] All fusosomes are analyzed within 2 hours of isolation. In an embodiment, the fusosomes will have a size within about 1%, 2%, 3%, 4%, 5%, 10%, 20%, 30%, 40%, 50%, 60%, 70%, 80%, 90%, or greater than the parental cells.

### Example 28: Measuring the Average Size Distribution of Fusosomes

[1010] This Example describes measurement of the size distribution of fusosomes.

[1011] Fusosomes are generated by any one of the methods described in previous Examples, and are tested to determine the average size of particles using a commercially available system, such as described in a previous Example. In an embodiment, size thresholds for 10%, 50%, and 90% of the fusosomes centered around the median are compared to parental cells to assess fusosome size distribution.

[1012] In an embodiment, the fusosomes will have less than about 90%, 80%, 70%, 60%, 50%, 40%, 30%, 20%, 10%, 5%, or less of the parental cell's variability in size distribution within 10%, 50%, or 90% of the sample.

### Example 29: Average Volume of Fusosomes

[1013] This example describes measurement of the average volume of fusosomes. Without wishing to be bound by theory, varying the size (e.g., volume) of fusosomes can make them versatile for distinct cargo loading, therapeutic design or application.

[1014] Fusosomes are prepared as described in previous Examples. The positive control is HEK293 cells or polystyrene beads with a known size. The negative control is HEK293 cells that are passed through a 36 gauge needle approximately 50 times.

[1015] Analysis with a transmission electron microscope, as described in a previous Example, is used to determine the size of the fusosomes. The diameter of the fusosome is measured and volume is then calculated.

[1016] In an embodiment, fusosomes will have an average size of approximately 50 nm or greater in diameter.

### Example 30: Average Density of Fusosomes

[1017] Fusosome density is measured via a continuous sucrose gradient centrifugation assay as described in Théry et al., Curr Protoc Cell Biol. 2006 April; Chapter 3:Unit 3.22. Fusosomes are obtained as described in previous Examples.

[1018] First, a sucrose gradient is prepared. A 2 M and a 0.25 sucrose solution are generated by mixing 4 ml HEPES/sucrose stock solution and 1 ml HEPES stock solution or 0.5 ml HEPES/sucrose stock solution and 4.5 ml HEPES stock solution, respectively. These two fractions are loaded into the gradient maker with all shutters closed, the 2 M sucrose solution in the proximal compartment with a magnetic stir bar, and the 0.25 M sucrose solution in the distal compartment. The gradient maker is placed on a magnetic stir plate, the shutter between proximal and distal compartments is opened and the magnetic stir plate is turned on. HEPES stock solution is made as follows: 2.4 g N-2-hydroxyethylpiperazine-N′-2-ethanesulfonic acid (HEPES; 20 mM final), 300 H2O, adjust pH to 7.4 with 10 N NaOH and finally adjust volume to 500 ml with H2O. HEPES/sucrose stock solution is made as follows: 2.4 g hydroxyethylpiperazine-N′-2-ethanesulfonic acid (HEPES; 20 mM final), 428 g protease-free sucrose (ICN; 2.5 M final), 150 ml H2O, adjust pH to 7.4 with 10 N NaOH and finally adjust volume to 500 ml with H2O.

[1019] The fusosomes are resuspended in 2 ml of HEPES/sucrose stock solution and are poured on the bottom of an SW 41 centrifuge tube. The outer tubing is placed in the SW 41 tube, just above the 2 ml of fusosomes. The outer shutter is opened, and a continuous 2 M (bottom) to 0.25 M (top) sucrose gradient is slowly poured on top of the fusosomes. The SW 41 tube is lowered as the gradient is poured, so that the tubing is always slightly above the top of the liquid.

[1020] All tubes with gradients are balanced with each other, or with other tubes having the same weight of sucrose solutions. The gradients are centrifuged overnight (≥14 hr) at 210,000×g, 4° C., in the SW 41 swinging-bucket rotor with the brake set on low.

[1021] With a micropipettor, eleven 1-ml fractions, from top to bottom, are collected and placed in a 3-ml tube for the TLA-100.3 rotor. The samples are set aside and, in separate wells of a 96-well plate, 50 μl of each fraction is used to measure the refractive index. The plate is covered with adhesive foil to prevent evaporation and stored for no more than 1 hour at room temperature. A refractometer is used to measure the refractive index (hence the sucrose concentration, and the density) of 10 to 20 μl of each fraction from the material saved in the 96-well plate.

[1022] A table for converting the refractive index into g/ml is available in the ultracentrifugation catalog downloadable from the Beckman website.

[1023] Each fraction is then prepared for protein content analysis. Two milliliters of 20 mM HEPES, pH 7.4, is added to each 1-ml gradient fraction, and mixed by pipetting up and down two to three times. One side of each tube is marked with a permanent marker, and the tubes are placed marked side up in a TLA-100.3 rotor.

[1024] The 3 ml-tubes with diluted fractions are centrifuged for 1 hr at 110,000×g, 4° C. The TLA-100.3 rotor holds six tubes, so two centrifugations for each gradient is performed with the other tubes kept at 4° C. until they can be centrifuged.

[1025] The supernatant is aspirated from each of the 3-ml tubes, leaving a drop on top of the pellet. The pellet most probably is not visible, but its location can be inferred from the mark on the tube. The invisible pellet is resuspended and transferred to microcentrifuge tubes. Half of each resuspended fraction is used for protein contentment analysis by bicinchoninic acid assay, described in another Example. This provides a distribution across the various gradient fractions of the fusosome preparation. This distribution is used to determine the average density of the fusosomes. The second half volume fraction is stored at −80° C. and used for other purposes (e.g. functional analysis, or further purification by immunoisolation) once protein analysis has revealed the fusosome distribution across fractions.

[1026] In an embodiment, using this assay, the average density of the fusosomes will be 1.25 g/ml+/−0.05 standard deviation. In an embodiment, the average density of the fusosomes will be in the range of 1-1.1, 1.05-1.15, 1.1-1.2, 1.15-1.25, 1.2-1.3, or 1.25-1.35. In an embodiment, the average density of the fusosomes will be less than 1 or more than 1.35.

### Example 31: Measuring Nuclear Envelope Content

[1027] This Example describes a measurement of the nuclear envelope content in enucleated fusosomes. The nuclear envelope isolates DNA from the cytoplasm of the cell.

[1028] In an embodiment, a purified fusosome composition comprises a mammalian cell, such as HEK-293Ts (293 [HEK-293] (ATCC® CRL-1573™), that has been enucleated as described herein. This Example describes the quantification of different nuclear membrane proteins as a proxy to measure the amount of intact nuclear membrane that remains after fusosome generation.

[1029] In this Example, 10×10⁶ HEK-293Ts and the equivalent amount of fusosomes prepared from 10×10⁶ HEK-293Ts are fixed for 15 min using 3.7% PFA, washed with 1× PBS buffer, pH 7.4 and permeabilized simultaneously, and then blocked for 15 min using 1× PBS buffer containing 1% Bovine Serum Albumin and 0.5% Triton® X-100, pH 7.4. After permeabilization, fusosomes and cells are incubated for 12 hours at 4° C. with different primary antibodies, e.g. (anti-RanGAP1 antibody [EPR3295] (Abcam-ab92360), anti-NUP98 antibody [EPR6678]-nuclear pore marker (Abcam-ab124980), anti-nuclear pore complex proteins antibody [Mab414]-(Abcam-ab24609), anti-importin 7 antibody (Abcam-ab213670), at manufacturer suggested concentrations diluted in 1× PBS buffer containing 1% bovine serum albumin and 0.5% Triton® X-100, pH 7.4. Fusosomes and cells are then washed with 1× PBS buffer, pH 7.4, and incubated for 2 hr at 21° C. with an appropriate fluorescent secondary antibody that detects the previous specified primary antibody at manufacturer suggested concentrations diluted in 1× PBS buffer containing 1% bovine serum albumin and 0.5% detergent, pH 7.4. Fusosomes and cells are then washed with 1× PBS buffer, re-suspended in 300 μL of 1× PBS buffer, pH 7.4 containing 1 μg/ml Hoechst 33342, filtered through a 20 μm FACS tube and analyzed by flow cytometry.

[1030] Negative controls are generated using the same staining procedure but with no primary antibody added. Flow cytometry is performed on a FACS cytometer (Becton Dickinson, San Jose, Calif., USA) with 488 nm argon laser excitation, and a 530+/−30 nm emission spectrum is collected. FACS acquisition software is used for acquisition and analysis. The light scatter channels are set on linear gains, and the fluorescence channels on a logarithmic scale, with a minimum of 10,000 cells analyzed in each condition. The relative intact nuclear membrane content is calculated based on the median intensity of fluorescence in each sample. All events are captured in the forward and side scatter channels.

[1031] The normalized fluorescence intensity value for the fusosomes is determined by subtracting from the median fluorescence intensity value of the fusosome the median fluorescence intensity value of the respective negative control sample. Then the normalized fluorescence for the fusosomes samples is normalized to the respective nucleated cell samples in order to generate quantitative measurements of intact nuclear membrane content.

[1032] In an embodiment, enucleated fusosomes will comprise less than 1%, 2%, 3%, 4%, 5%, 10%, 20%, 30%, 40%, 50%, 60%, 70%, 80%, or 90% fluorescence intensity or nuclear envelope content compared to the nucleated parental cells.

### Example 32: Measuring Chromatin Levels

[1033] This Example describes measurement of chromatin in enucleated fusosomes.

[1034] DNA can be condensed into chromatin to allow it to fit inside the nucleus. In an embodiment, a purified fusosome composition as produced by any one of the methods described herein will comprise low levels of chromatin.

[1035] Enucleated fusosomes prepared by any of the methods previously described and positive control cells (e.g., parental cells) are assayed for chromatin content using an ELISA with antibodies that are specific to histone protein H3 or histone protein H4. Histones are the chief protein component of chromatin, with H3 and H4 the predominant histone proteins.

[1036] Histones are extracted from the fusosome preparation and cell preparation using a commercial kit (e.g. Abcam Histone Extraction Kit (ab113476)) or other methods known in the art. These aliquots are stored at −80 C until use. A serial dilution of standard is prepared by diluting purified histone protein (either H3 or H4) from 1 to 50 ng/μl in a solution of the assay buffer. The assay buffer may be derived from a kit supplied by a manufacturer (e.g. Abcam Histone H4 Total Quantification Kit (ab156909) or Abcam Histone H3 total Quantification Kit (ab115091)). The assay buffer is added to each well of a 48- or 96-well plate, which is coated with an anti-histone H3 or anti-H4 antibody and sample or standard control is added to the well to bring the total volume of each well to 50 μl. The plate is then covered and incubated at 37 degrees for 90 to 120 minutes.

[1037] After incubation, any histone bound to the anti-histone antibody attached to the plate is prepared for detection. The supernatant is aspirated and the plate is washed with 150 μl of wash buffer. The capture buffer, which includes an anti-histone H3 or anti-H4 capture antibody, is then added to the plate in a volume of 50 μl and at a concentration of 1 μg/mL. The plate is then incubated at room temperature on an orbital shaker for 60 minutes.

[1038] Next, the plate is aspirated and washed 6 times using wash buffer. Signal reporter molecule activatable by the capture antibody is then added to each well. The plate is covered and incubated at room temperature for 30 minutes. The plate is then aspirated and washed 4 times using wash buffer. The reaction is stopped by adding stop solution. The absorbance of each well in the plate is read at 450 nm, and the concentration of histones in each sample is calculated according to the standard curve of absorbance at 450 nm vs. concentration of histone in standard samples.

[1039] In an embodiment, fusosome samples will comprise less than 1%, 2%, 3%, 4%, 5%, 10%, 20%, 30%, 40%, 50%, 60%, 70%, 80%, or 90% the histone concentration of the nucleated parental cells.

### Example 33: Measuring miRNA Content in Fusosomes

[1040] This example describes quantification of microRNAs (miRNAs) in fusosomes. In an embodiment, a fusosome comprises miRNAs.

[1041] MiRNAs are regulatory elements that, among other activities, control the rate by which messenger RNAs (mRNAs) are translated into proteins. In an embodiment, fusosomes carrying miRNA may be used to deliver the miRNA to target sites.

[1042] Fusosomes are prepared by any one of the methods described in previous Examples. RNA from fusosomes or parental cells is prepared as described previously. At least one miRNA gene is selected from the Sanger Center miRNA Registry at www.sanger.ac.uk/Software/Rfam/mirna/index.shtml. miRNA is prepared as described in Chen et al, Nucleic Acids Research, 33(20), 2005. All TaqMan miRNA assays are available through Thermo Fisher (A25576, Waltham, Mass.).

[1043] qPCR is carried out according to manufacturer's specifications on miRNA cDNA, and C_{T} values are generated and analyzed using a real-time PCR system as described herein.

[1044] In an embodiment, the miRNA content of fusosomes will be at least 1%, 2%, 3%, 4%, 5%, 10%, 20%, 30%, 40%, 50%, 60%, 70%, 80%, 90%, or greater than that of their parental cells.

### Example 34: Quantifying Expression of an Endogenous RNA or Synthetic RNA in Fusosomes

[1045] This example describes quantification of levels of endogenous RNA with altered expression, or a synthetic RNA that is expressed in a fusosome.

[1046] The fusosome or parental cell is engineered to alter the expression of an endogenous or synthetic RNA that mediates a cellular function to the fusosomes.

[1047] Transposase vectors (System Biosciences, Inc.) includes the open reading frame of the Puromycin resistance gene together with an open reading frame of a cloned fragment of a protein agent. The vectors are electroporated into 293Ts using an electroporator (Amaxa) and a 293T cell line specific nuclear transfection kit (Lonza).

[1048] Following selection with puromycin for 3-5 days in DMEM containing 20% Fetal Bovine Serum and 1× Penicillin/Streptomycin, fusosomes are prepared from the stably expressing cell line by any one of the methods described in previous Examples.

[1049] Individual fusosomes are isolated and protein agent or RNA per fusosome is quantified as described in a previous Example.

[1050] In an embodiment, the fusosomes will have at least 1, 2, 3, 4, 5, 10, 20, 50, 100, 500, 10³, 5.0×10³, 10⁴, 5.0×10⁴, 10⁵, 5.0×10⁵, 10⁶, 5.0×10⁶, or more of the RNA per fusosome.

### Example 35: Measuring Proteomic Composition in Fusosomes

[1051] This Example describes quantification of the protein composition of fusosomes. In an embodiment, the protein composition of fusosomes will be similar to the cells that they are derived from.

[1052] Fusosomes are prepared by any one of the methods described in previous Examples. Fusosomes are resuspended in lysis buffer (7M Urea, 2M Thiourea, 4% (w/v) Chaps in 50 mM Tris pH 8.0) and incubated for 15 minutes at room temperature with occasional vortexing. Mixtures are then lysed by sonication for 5 minutes in an ice bath and spun down for 5 minutes at 13,000 RPM. Protein content is determined by a colorimetric assay (Pierce) and protein of each sample is transferred to a new tube and the volume is equalized with 50 mM Tris pH 8.

[1053] Proteins are reduced for 15 minutes at 65 Celsius with 10 mM DTT and alkylated with 15 mM iodoacetamide for 30 minutes at room temperature in the dark. Proteins are precipitated with gradual addition of 6 volumes of cold (−20 Celsius) acetone and incubated overnight at −80 Celsius. Protein pellets are washed 3 times with cold (−20 Celsius) methanol. Proteins are resuspended in 50 mM Tris pH 8.3.

[1054] Next, trypsin/lysC is added to the proteins for the first 4 h of digestion at 37 Celsius with agitation. Samples are diluted with 50 mM Tris pH 8 and 0.1% sodium deoxycholate is added with more trypsin/lysC for digestion overnight at 37 Celsius with agitation. Digestion is stopped and sodium deoxycholate is removed by the addition of 2% v/v formic acid. Samples are vortexed and cleared by centrifugation for 1 minute at 13,000 RPM. Peptides are purified by reversed phase solid phase extraction (SPE) and dried down. Samples are reconstituted in 20 μl of 3% DMSO, 0.2% formic acid in water and analyzed by LC-MS.

[1055] To have quantitative measurements, a protein standard is also run on the instrument. Standard peptides (Pierce, equimolar, LC-MS grade, #88342) are diluted to 4, 8, 20, 40 and 100 fmol/ul and are analyzed by LC-MS/MS. The average AUC (area under the curve) of the 5 best peptides per protein (3 MS/MS transition/peptide) is calculated for each concentration to generate a standard curve.

[1056] Acquisition is performed with a high resolution mass spectrometer (ABSciex, Foster City, Calif., USA) equipped with an electrospray interface with a 25 μm iD capillary and coupled with micro-ultrahigh performance liquid chromatography (μUHPLC) (Eksigent, Redwood City, Calif., USA). Analysis software is used to control the instrument and for data processing and acquisition. The source voltage is set to 5.2 kV and maintained at 225° C., curtain gas is set at 27 psi, gas one at 12 psi and gas two at 10 psi. Acquisition is performed in Information Dependent Acquisition (IDA) mode for the protein database and in SWATH acquisition mode for the samples. Separation is performed on a reversed phase column 0.3 μm i.d., 2.7 μm particles, 150 mm long (Advance Materials Technology, Wilmington, Del.) which is maintained at 60° C. Samples are injected by loop overfilling into a 5 μL loop. For the 120 minute (samples) LC gradient, the mobile phase includes the following: solvent A (0.2% v/v formic acid and 3% DMSO v/v in water) and solvent B (0.2% v/v formic acid and 3% DMSO in EtOH) at a flow rate of 3 μL/min.

[1057] For the absolute quantification of the proteins, a standard curve (5 points, R2>0.99) is generated using the sum of the AUC of the 5 best peptides (3 MS/MS ion per peptide) per protein. To generate a database for the analysis of the samples, the DIAUmpire algorithm is run on each of the 12 samples and combined with the output MGF files into one database. This database is used with software (ABSciex) to quantify the proteins in each of the samples, using 5 transition/peptide and 5 peptide/protein maximum. A peptide is considered as adequately measured if the score computed is superior to 1.5 or had a FDR <1%. The sum of the AUC of each of the adequately measured peptides is mapped on the standard curve, and is reported as fmol.

[1058] The resulting protein quantification data is then analyzed to determine protein levels and proportions of known classes of proteins as follows: enzymes are identified as proteins that are annotated with an Enzyme Commission (EC) number; ER associated proteins are identified as proteins that had a Gene Ontology (GO; http://www.geneontology.org) cellular compartment classification of ER and not mitochondria; exosome associated proteins are identified as proteins that have a Gene Ontology cellular compartment classification of exosomes and not mitochondria; and mitochondrial proteins are identified as proteins that are identified as mitochondrial in the MitoCarta database (Calvo et al., NAR 20151 doi:10.1093/nar/gkv1003). The molar ratios of each of these categories are determined as the sum of the molar quantities of all the proteins in each class divided by the sum of the molar quantities of all identified proteins in each sample.

[1059] Fusosome proteomic composition is compared to parental cell proteomic composition. In an embodiment, a similar proteomic compositions between fusosomes and parental cells will be observed when >50% of the identified proteins are present in the fusosome, and of those identified proteins the level is >25% of the corresponding protein level in the parental cell.

### Example 36: Measuring GAPDH in Fusosomes

[1060] This assay describes quantification of the level of glyceraldehyde 3-phosphate dehydrogenase (GAPDH) in the fusosomes, and the relative level of GAPDH in the fusosomes compared to the parental cells.

[1061] GAPDH is measured in the parental cells and the fusosomes using a standard commercially available ELISA for GAPDH (ab176642, Abcam) per the manufacturer's directions.

[1062] Total protein levels are similarly measured via bicinchoninic acid assay as previously described in the same volume of sample used to measure GAPDH. In embodiments, using this assay, the level of GAPDH per total protein in the fusosomes will be <100 ng GAPDH/μg total protein. Similarly, in embodiments, the decrease in GAPDH levels relative to total protein from the parental cells to the fusosomes will be greater than a 10% decrease.

[1063] In an embodiment, GAPDH content in the preparation in ng GAPDH/μg total protein will be less than 500, less than 250, less than 100, less than 50, less than 20, less than 10, less than 5, or less than 1.

[1064] In an embodiment, the decrease in GAPDH per total protein in ng/μg from the parent cell to the preparation will be more than 1%, more than 2.5%, more than 5%, more than 10%, more than 15%, more than 20%, more than 30%, more than 40%, more than 50%, more than 60%, more than 70%, more than 80%, or more than 90%.

### Example 37: Measuring Calnexin in Fusosomes

[1065] This assay describes quantification of the level of calnexin (CNX) in the fusosomes, and the relative level of CNX in the fusosomes compared to the parental cells.

[1066] Calnexin is measured in the starting cells and the preparation using a standard commercially available ELISA for calnexin (MBS721668, MyBioSource) per the manufacturer's directions.

[1067] Total protein levels are similarly measured via bicinchoninic acid assay as previously described in the same volume of sample used to measure calnexin. In embodiments, using this assay, the level of calnexin per total protein in the fusosomes will be <100 ng calnexin/μg total protein. Similarly, in embodiments, the increase in calnexin levels relative to total protein from the parental cell to the fusosomes will be greater than a 10% increase.

[1068] In an embodiment, calnexin content in the preparation in ng calnexin/μg total protein will be less than 500, 250, 100, 50, 20, 10, 5, or 1.

[1069] In an embodiment, the decrease in calnexin per total protein in ng/μg from the parent cell to the preparation will be more than 1%, 2.5%, 5%, 10%, 15%, 20%, 30%, 40%, 50%, 60%, 70%, 80%, or 90%.

### Example 38: Comparison of Soluble to Insoluble Protein Mass

[1070] This Example describes quantification of the soluble:insoluble ratio of protein mass in fusosomes. In an embodiment, the soluble:insoluble ratio of protein mass in fusosomes will be similar to nucleated cells.

[1071] Fusosomes are prepared by any one of the methods described in previous Examples. The fusosome preparation is tested to determine the soluble: insoluble protein ratio using a standard bicinchoninic acid assay (BCA) (e.g. using the commercially available Pierce™ BCA Protein Assay Kit, Thermo Fischer product #23225). Soluble protein samples are prepared by suspending the prepared fusosomes or parental cells at a concentration of 1×10^7 cells or fusosomes/mL in PBS and centrifuging at 1600 g to pellet the fusosomes or cells. The supernatant is collected as the soluble protein fraction.

[1072] The fusosomes or cells in the pellet are lysed by vigorous pipetting and vortexing in PBS with 2% Triton-X-100. The lysed fraction represents the insoluble protein fraction.

[1073] A standard curve is generated using the supplied BSA, from 0 to 20 μg of BSA per well (in triplicate). The fusosome or cell preparation is diluted such that the quantity measured is within the range of the standards. The fusosome preparation is analyzed in triplicate and the mean value is used. The soluble protein concentration is divided by the insoluble protein concentration to yield the soluble:insoluble protein ratio.

[1074] In an embodiment, the fusosome soluble:insoluble protein ratio will be within 1%, 2%, 3%, 4%, 5%, 10%, 20%, 30%, 40%, 50%, 60%, 70%, 80%, 90%, or greater compared to the parental cells.

### Example 39: Measuring LPS in Fusosomes

[1075] This example describes quantification of levels of lipopolysaccharides (LPS) in fusosomes as compared to parental cells. In an embodiment, fusosomes will have lower levels of LPS compared to parental cells.

[1076] LPS are a component of bacterial membranes and potent inducer of innate immune responses.

[1077] The LPS measurements are based on mass spectrometry as described in the previous Examples.

[1078] In an embodiment, less than 5%, 1%, 0.5%, 0.01%, 0.005%, 0.0001%, 0.00001% or less of the lipid content of fusosomes will be LPS.

### Example 40: Ratio of Lipids to Proteins in Fusosomes

[1079] This Example describes quantification of the ratio of lipid mass to protein mass in fusosomes. In an embodiment, fusosomes will have a ratio of lipid mass to protein mass that is similar to nucleated cells.

[1080] Total lipid content is calculated as the sum of the molar content of all lipids identified in the lipidomics data set outlined in a previous Example. Total protein content of the fusosomes is measured via bicinchoninic acid assay as described herein.

[1081] Alternatively, the ratio of lipids to proteins can be described as a ratio of a particular lipid species to a specific protein. The particular lipid species is selected from the lipidomics data produced in a previous Example. The specific protein is selected from the proteomics data produced in a previous Example. Different combinations of selected lipid species and proteins are used to define specific lipid:protein ratios.

### Example 41: Ratio of Proteins to DNA in Fusosomes

[1082] This Example describes quantification of the ratio of protein mass to DNA mass in fusosomes. In an embodiment, fusosomes will have a ratio of protein mass to DNA mass that is much greater than cells.

[1083] Total protein content of the fusosomes and cells is measured as described in in a previous Example. The DNA mass of fusosomes and cells is measured as described in a previous Example. The ratio of proteins to total nucleic acids is then determined by dividing the total protein content by the total DNA content to yield a ratio within a given range for a typical fusosome preparation.

[1084] Alternatively, the ratio of proteins to nucleic acids is determined by defining nucleic acid levels as the level of a specific house-keeping gene, such as GAPDH, using semi-quantitative real-time PCR (RT-PCR).

[1085] The ratio of proteins to GAPDH nucleic acids is then determined by dividing the total protein content by the total GAPDH DNA content to define a specific range of protein:nucleic acid ratio for a typical fusosome preparation.

### Example 42: Measuring Fusion with a Target Cell

[1086] This example describes quantification of fusosome fusion with a target cell compared to a non-target cell.

[1087] In an embodiment, fusosome fusion with a target cell allows the cell-specific delivery of a cargo, carried within the lumen of the fusosome, to the cytosol of the recipient cell. Fusosomes produced by the herein described methods are assayed for fusion rate with a target cell as follows.

[1088] In this example, the fusosome comprises a HEK293T cell expressing Myomaker on its plasma membrane. In addition, the fusosome expresses mTagBFP2 fluorescent protein and Cre recombinase. The target cell is a myoblast cell, which expresses both Myomaker and Myomixer, and the non-target cell is a fibroblast cell, which expresses neither Myomaker nor Myomixer. A Myomaker-expressing fusosome is predicted to fuse with the target cell that expresses both Myomaker and Myomixer but not the non-target cell (Quinn et al., 2017, Nature Communications, 8, 15665. doi.org/10.1038/ncomms15665) (Millay et al., 2013, Nature, 499(7458), 301-305. doi.org/10.1038/nature12343). Both the target and non-target cell types are isolated from mice and stably-express “LoxP-stop-Loxp-tdTomato” cassette under a CMV promoter, which upon recombination by Cre turns on tdTomato expression, indicating fusion.

[1089] The target or non-target recipient cells are plated into a black, clear-bottom 96-well plate. Both target and non-target cells are plated for the different fusion groups. Next, 24 hours after plating the recipient cells, the fusosomes expressing Cre recombinase protein and Myomaker are applied to the target or non-target recipient cells in DMEM media. The dose of fusosomes is correlated to the number of recipient cells plated in the well. After applying the fusosomes, the cell plate is centrifuged at 400 g for 5 minutes to help initiate contact between the fusosomes and the recipient cells.

[1090] Starting at four hours after fusosome application, the cell wells are imaged to positively identify RFP-positive cells versus GFP-positive cells in the field or well.

[1091] In this example, cell plates are imaged using an automated microscope (www.biotek.com/products/imaging-microscopy-automated-cell-imagers/lionheart-fx-automated-live-cell-imager/). The total cell population in a given well is determined by first staining the cells with Hoechst 33342 in DMEM media for 10 minutes. Hoechst 33342 stains cell nuclei by intercalating into DNA and therefore is used to identify individual cells. After staining, the Hoechst media is replaced with regular DMEM media.

[1092] The Hoechst is imaged using the 405 nm LED and DAPI filter cube. GFP is imaged using the 465 nm LED and GFP filter cube, while RFP is imaged using 523 nm LED and RFP filter cube. Images of target and non-target cell wells are acquired by first establishing the LED intensity and integration times on a positive-control well; i.e., recipient cells treated with adenovirus coding for Cre recombinase instead of fusosomes.

[1093] Acquisition settings are set so that RFP and GFP intensities are at the maximum pixel intensity values but not saturated. The wells of interest are then imaged using the established settings. Wells are imaged every 4 hours to acquire time-course data for rates of fusion activity.

[1094] Analysis of GFP and RFP-positive wells is performed with software provided with the fluorescent microscope or other software (Rasband, W. S., ImageJ, U. S. National Institutes of Health, Bethesda, Md., USA, rsb.info.nih.gov/ij/, 1997-2007).

[1095] The images are pre-processed using a rolling ball background subtraction algorithm with a 60 μm width. The total cell mask is set on the Hoechst-positive cells. Cells with Hoechst intensity significantly above background intensities are thresholded and areas too small or large to be Hoechst-positive cells are excluded.

[1096] Within the total cell mask, GFP and RFP-positive cells are identified by again thresholding for cells significantly above background and extending the Hoechst (nuclei) masks for the entire cell area to include the entire GFP and RFP cellular fluorescence. The number of RFP-positive cells identified in control wells containing target or non-target recipient cells is used to subtract from the number of RFP-positive cells in the wells containing fusosome (to subtract for non-specific Loxp recombination). The number of RFP-positive cells (fused recipient cells) is then divided by the sum of the GFP-positive cells (recipient cells that have not fused) and RFP-positive cells at each time point to quantify the rate of fusosome fusion within the recipient cell population. The rate is normalized to the given dose of fusosome applied to the recipient cells. For rates of targeted fusion (fusosome fusion to targeted cells), the rate of fusion to the non-target cell is subtracted from the rate of fusion to the target cell in order to quantify rates of targeted fusion.

[1097] In an embodiment, the average rate of fusion for the fusosomes with the target cells will be in the range of 0.01-4.0 RFP/GFP cells per hour for target cell fusion or at least 1%, 2%, 3%, 4%, 5%, 10%, 20%, 30%, 40%, 50%, 60%, 70%, 80%, 90% or greater than non-target recipient cells with fusosomes. In an embodiment, groups with no fusosome applied will show a background rate of <0.01 RFP/GFP cells per hour.

### Example 43: In Vitro Fusion to Deliver a Membrane Protein

[1098] This example describes fusosome fusion with a cell in vitro. In an embodiment, fusosome fusion with a cell in vitro results in delivery of an active membrane protein to the recipient cell.

[1099] In this example, the fusosomes are generated from a HEK293T cell expressing the Sendai virus HVJ-E protein (Tanaka et al., 2015, Gene Therapy, 22(October 2014), 1-8. doi.org/10.1038/gt.2014.12). In an embodiment, the fusosomes are generated to express the membrane protein, GLUT4, which is found primarily in muscle and fat tissues and is responsible for the insulin-regulated transport of glucose into cells. Fusosomes with and without GLUT4 are prepared from HEK293T cells as described by any of the methods described in a previous Example.

[1100] Muscles cells, such as, C2C12 cells, are then treated with fusosomes expressing GLUT4, fusosomes that do not express GLUT4, PBS (negative control), or insulin (positive control). The activity of GLUT4 on C2C12 cells is measured by the uptake of the fluorescent 2-deoxyglucose analog, 2-[N-(7-nitrobenz-2-oxa-1,3-diaxol-4-yl)amino]-2-deoxyglucose (2-NBDG). The fluorescence of C2C12 cells is assessed via microscopy using methods described in previous Examples.

[1101] In an embodiment, C2C12 cells that are treated with fusosomes that express GLUT4 and insulin are expected to demonstrate increased fluorescence compared to C2C12 cells treated with PBS or fusosomes not expressing GLUT4.

[1102] See, also, Yang et al., Advanced Materials 29, 1605604, 2017.

### Example 44: Measuring Extravasation from Blood Vessels

[1103] This Example describes quantification of fusosome extravasation across an endothelial monolayer as tested with an in vitro microfluidic system (J. S Joen et al. 2013, journals.plos.org/plosone/article?id=10.1371/journal.pone.0056910).

[1104] Cells extravasate from the vasculature into surrounding tissue. Without wishing to be bound by theory, extravasation is one way for fusosomes to reach extravascular tissues.

[1105] The system includes three independently addressable media channels, separated by chambers into which an ECM-mimicking gel can be injected. In brief, the microfluidics system has molded PDMS (poly-dimethyl siloxane; Silgard 184; Dow Chemical, Mich.) through which access ports are bored and bonded to a cover glass to form microfluidic channels. Channel cross-sectional dimensions are 1 mm (width) by 120 μm (height). To enhance matrix adhesion, the PDMS channels are coated with a PDL (poly-D-lysine hydrobromide; 1 mg/ml; Sigma-Aldrich, St. Louis, Mo.) solution.

[1106] Next, collagen type I (BD Biosciences, San Jose, Calif., USA) solution (2.0 mg/ml) with phosphate-buffered saline (PBS; Gibco) and NaOH is injected into the gel regions of the device via four separate filling ports and incubated for 30 min to form a hydrogel. When the gel is polymerized, endothelial cell medium (acquired from suppliers such as Lonza or Sigma) is immediately pipetted into the channels to prevent dehydration of the gel. Upon aspirating the medium, diluted hydrogel (BD science) solution (3.0 mg/ml) is introduced into the cell channel and the excess hydrogel solution is washed away using cold medium.

[1107] Endothelial cells are introduced into the middle channel and allowed to settle to form an endothelium. Two days after endothelial cell seeding, fusosomes or macrophage cells (positive control) are introduced into the same channel where endothelial cells had formed a complete monolayer. The fusosomes are introduced so they adhere to and transmigrate across the monolayer into the gel region. Cultures are kept in a humidified incubator at 37° C. and 5% CO₂. A GFP-expressing version of the fusosome is used to enable live-cell imaging via fluorescent microscopy. On the following day, cells are fixed and stained for nuclei using DAPI staining in the chamber, and multiple regions of interest are imaged using confocal microscope to determine how many fusosomes passed through the endothelial monolayer.

[1108] In an embodiment, DAPI staining will indicate that fusosomes and positive control cells are able to pass through the endothelial barrier after seeding.

### Example 45: Measuring Chemotactic Cell Mobility

[1109] This Example describes quantification of fusosome chemotaxis. Cells can move towards or away from a chemical gradient via chemotaxis. In an embodiment, chemotaxis will allow fusosomes to home to a site of injury, or track a pathogen. A purified fusosome composition as produced by any one of the methods described in previous Examples is assayed for its chemotactic abilities as follows.

[1110] A sufficient number of fusosomes or macrophage cells (positive control) are loaded in a micro-slide well according to the manufacturer's provided protocol in DMEM media (ibidi.com/img/cms/products/labware/channel_slides/S_8032X_Chemotaxis/IN_8032X_Chemotaxis.pdf). Fusosomes are left at 37° C. and 5% CO2 for 1 h to attach. Following cell attachment, DMEM (negative control) or DMEM containing MCP1 chemoattractant is loaded into adjacent reservoirs of the central channel and the fusosomes are imaged continuously for 2 hours using a Zeiss inverted widefield microscope. Images are analyzed using ImageJ software (Rasband, W. S., ImageJ, U. S. National Institutes of Health, Bethesda, Md., USA, http://rsb.info.nih.gov/ij/, 1997-2007). Migration co-ordination data for each observed fusosome or cell is acquired with the manual tracking plugin (Fabrice Cordeliéres, Institut Curie, Orsay, France). Chemotaxis plots and migration velocities is determined with the Chemotaxis and Migration Tool (ibidi).

[1111] In an embodiment, the average accumulated distance and migration velocity of fusosomes will be within 1%, 2%, 3%, 4%, 5%, 10%, 20%, 30%, 40%, 50%, 60%, 70%, 80%, 90%, 100% or greater than the response of the positive control cells to chemokine. The response of cells to a chemokine is described, e.g., in Howard E. Gendelman et al., Journal of Neuroimmune Pharmacology, 4(1): 47-59, 2009.

### Example 46: Measuring Homing Potential

[1112] This Example describes homing of fusosomes to a site of injury. Cells can migrate from a distal site and/or accumulate at a specific site, e.g., home to a site. Typically, the site is a site of injury. In an embodiment, fusosomes will home to, e.g., migrate to or accumulate at, a site of injury.

[1113] Eight week old C57BL/6J mice (Jackson Laboratories) are dosed with notexin (NTX) (Accurate Chemical & Scientific Corp), a myotoxin, in sterile saline by intramuscular (IM) injection using a 30 G needle into the right tibialis anterior (TA) muscle at a concentration of 2 μg/mL. The skin over the tibialis anterior (TA) muscle is prepared by depilating the area using a chemical hair remover for 45 seconds, followed by 3 rinses with water. This concentration is chosen to ensure maximum degeneration of the myofibers, as well as minimal damage to their satellite cells, the motor axons and the blood vessels.

[1114] On day 1 after NTX injection, mice receive an IV injection of fusosomes or cells that express firefly luciferase. Fusosomes are produced from cells that stably express firefly luciferase by any one of the methods described in previous Examples. A bioluminescent imaging system (Perkin Elmer) is used to obtain whole animal images of bioluminescence at 0, 1, 3, 7, 21, and 28 post injection.

[1115] Five minutes before imaging, mice receive an intraperitoneal injection of bioluminescent substrate (Perkin Elmer) at a dose of 150 mg/kg in order to visualize luciferase. The imaging system is calibrated to compensate for all device settings. The bioluminescent signal is measured using Radiance Photons, with Total Flux used as a measured value. The region of interest (ROI) is generated by surrounding the signal of the ROI in order to give a value in photons/second. An ROI is assessed on both the TA muscle treated with NTX and on the contralateral TA muscle, and the ratio of photons/second between NTX-treated and NTX-untreated TA muscles is calculated as a measure of homing to the NTX-treated muscle.

[1116] In an embodiment, the ratio of photons/second between NTX-treated and NTX-untreated TA muscles in fusosomes and cells will be greater than 1 indicating site specific accumulation of luciferase-expressing fusosomes at the injury.

[1117] See, for example, Plant et al., Muscle Nerve 34(5)L 577-85, 2006.

### Example 47: Measuring Phagocytic Activity

[1118] This Example demonstrates phagocytic activity of fusosomes. In an embodiment, fusosomes have phagocytic activity, e.g., are capable of phagocytosis. Cells engage in phagocytosis, engulfing particles, enabling the sequestration and destruction of foreign invaders, like bacteria or dead cells.

[1119] A purified fusosome composition as produced by any one of the methods described in previous Examples comprising a fusosome from a mammalian macrophage having partial or complete nuclear inactivation was capable of phagocytosis assayed via pathogen bioparticles. This estimation was made by using a fluorescent phagocytosis assay according to the following protocol.

[1120] Macrophages (positive control) and fusosomes were plated immediately after harvest in separate confocal glass bottom dishes. The macrophages and fusosomes were incubated in DMEM+10% FBS+1% P/S for 1 h to attach. Fluorescein-labeled E. coli K12 and non-fluorescein-labeled Escherichia coli K-12 (negative control) were added to the macrophages/fusosomes as indicated in the manufacturer's protocol, and were incubated for 2 h, tools.thermofisher.com/content/sfs/manuals/mp06694.pdf. After 2 h, free fluorescent particles were quenched by adding Trypan blue. Intracellular fluorescence emitted by engulfed particles was imaged by confocal microscopy at 488 excitation. The number of phagocytotic positive fusosome were quantified using image J software.

[1121] The average number of phagocytotic fusosomes was at least 30% 2 h after bioparticle introduction, and was greater than 30% in the positive control macrophages.

### Example 48: Measuring Potential for Protein Secretion

[1122] This Example describes quantification of secretion by fusosomes. In an embodiment, fusosomes will be capable of secretion, e.g., protein secretion. Cells can dispose or discharge of material via secretion. In an embodiment, fusosomes will chemically interact and communicate in their environment via secretion.

[1123] The capacity of fusosomes to secrete a protein at a given rate is determined using the Gaussia luciferase flash assay from ThermoFisher Scientific (catalog #16158). Mouse embryonic fibroblast cells (positive control) or fusosomes as produced by any one of the methods described in previous Examples are incubated in growth media and samples of the media are collected every 15 minutes by first pelleting the fusosomes at 1600 g for 5 min and then collecting the supernatant. The collected samples are pipetted into a clear-bottom 96-well plate. A working solution of assay buffer is then prepared according to the manufacturer's instructions.

[1124] Briefly, colenterazine, a luciferin or light-emitting molecule, is mixed with flash assay buffer and the mixture is pipetted into each well of the 96 well plate containing samples. Negative control wells that lack cells or fusosomes include growth media or assay buffer to determine background Gaussia luciferase signal. In addition, a standard curve of purified Gaussia luciferase (Athena Enzyme Systems, catalog #0308) is prepared in order to convert the luminescence signal to molecules of Gaussia luciferase secretion per hour.

[1125] The plate is assayed for luminescence, using 500 msec integration. Background Gaussia luciferase signal is subtracted from all samples and then a linear best-fit curve is calculated for the Gaussia luciferase standard curve. If sample readings do not fit within the standard curve, they are diluted appropriately and re-assayed. Using this assay, the capacity for fusosomes to secrete Gaussia luciferase at a rate (molecules/hour) within a given range is determined.

[1126] In an embodiment, fusosomes will be capable of secreting proteins at a rate that is 1%, 2%, 3%, 4%, 5%, 10%, 20%, 30%, 40%, 50%, 60%, 70%, 80%, 90%, 100% or greater than the positive control cells.

### Example 49: Measuring Signal Transduction Potential

[1127] This Example describes quantification of signal transduction in fusosomes. In an embodiment, fusosomes are capable of signal transduction. Cells can send and receive molecular signals from the extracellular environment through signaling cascades, such as phosphorylation, in a process known as signal transduction. A purified fusosome composition as produced by any one of the methods described in previous Examples comprising a fusosome from a mammalian cell having partial or complete nuclear inactivation is capable of signal transduction induced by insulin. Signal transduction induced by insulin is assessed by measuring AKT phosphorylation levels, a key pathway in the insulin receptor signaling cascade, and glucose uptake in response to insulin.

[1128] To measure AKT phosphorylation, cells, e.g., Mouse Embryonic Fibroblasts (MEFs) (positive control), and fusosomes are plated in 48-well plates and left for 2 hours in a humidified incubator at 37° C. and 5% CO₂. Following cell adherence, insulin (e.g. at 10 nM), or a negative control solution without insulin, is add to the well containing cells or fusosomes for 30 min. After 30 minutes, protein lysate is made from the fusosomes or cells, and phospho-AKT levels are measured by western blotting in insulin stimulated and control unstimulated samples.

[1129] Glucose uptake in response to insulin or negative control solution is measured as it is explained in the glucose uptake section by using labeled glucose (2-NBDG). (S. Galic et al., Molecular Cell Biology 25(2): 819-829, 2005).

[1130] In an embodiment, fusosomes will enhance AKT phosphorylation and glucose uptake in response to insulin over the negative controls by at least 1%, 2%, 3%, 4%, 5%, 10%, 20%, 30%, 40%, 50%, 60%, 70%, 80%, 90%, 100% or greater.

### Example 50: Measuring Ability to Transport Glucose Across Cell Membrane

[1131] This Example describes quantification of the levels of a 2-NBDG (2-(N-(7-Nitrobenz-2-oxa-1,3-diazol-4-yl)Amino)-2-Deoxyglucose) a fluorescent glucose analog that can be used to monitor glucose uptake in live cells, and thus measure active transport across the lipid bilayer. In an embodiment, this assay can be used to measure the level of glucose uptake and active transport across the lipid bilayer of the fusosome.

[1132] A fusosome composition is produced by any one of the methods described in previous Examples. A sufficient number of fusosomes are then incubated in DMEM with no glucose, 20% Fetal Bovine Serum and 1× Penicillin/Streptomycin for 2 hr at 37° C. and 5% CO₂. After a 2 hr glucose starvation period, the medium is changed such that it includes DMEM with no glucose, 20% Fetal Bovine Serum, 1× Penicillin/Streptomycin and 20 uM 2-NBDG (ThermoFisher) and incubated for an additional 2 hr at 37° C. and 5% CO₂.

[1133] Negative control fusosomes are treated the same, except an equal amount of DMSO is added in place of 2-NBDG.

[1134] The fusosomes are then washed thrice with 1× PBS and re-suspended in an appropriate buffer, and transferred to a 96 well imaging plate. 2-NBDG fluorescence is then measured in a fluorimeter using a GFP light cube (469/35 excitation filter and a 525/39 emission filter) to quantify the amount of 2-NBDG that has been transported across the fusosome membrane and accumulated in the fusosome in the 1 hr loading period.

[1135] In an embodiment, 2-NBDG fluorescence will be higher in the fusosome with 2-NBDG treatment as compared to the negative (DMSO) control. Fluorescence measure with a 525/39 emission filter will correlate with to the number of 2-NBDG molecules present.

### Example 51: Measuring Esterase Activity in the Cytosol

[1136] This Example describes quantification of esterase activity, as a surrogate for metabolic activity, in fusosomes. The cytosolic esterase activity in fusosomes is determined by quantitative assessment of calcein-AM staining (Bratosin et al., Cytometry 66(1): 78-84, 2005).

[1137] The membrane-permeable dye, calcein-AM (Molecular Probes, Eugene Oreg. USA), is prepared as a stock solution of 10 mM in dimethylsulfoxide and as a working solution of 100 mM in PBS buffer, pH 7.4. Fusosomes as produced by any one of the methods described in previous Examples or positive control parental Mouse Embryonic Fibroblast cells are suspended in PBS buffer and incubated for 30 minutes with calcein-AM working solution (final concentration in calcein-AM: 5 mM) at 37° C. in the dark and then diluted in PBS buffer for immediate flow cytometric analysis of calcein fluorescence retention.

[1138] Fusosomes and control parental Mouse Embryonic Fibroblast cells are experimental permeabilized as a negative control for zero esterase activity with saponin as described in (Jacob et al., Cytometry 12(6): 550-558, 1991). Fusosomes and cells are incubated for 15 min in 1% saponin solution in PBS buffer, pH 7.4, containing 0.05% sodium azide. Due to the reversible nature of plasma membrane permeabilization, saponin is included in all buffers used for further staining and washing steps. After saponin permeabilization, fusosomes and cells are suspended in PBS buffer containing 0.1% saponin and 0.05% sodium azide and incubated (37 C in the dark for 45 min) with calcein-AM to a final concentration of 5 mM, washed three times with the same PBS buffer containing 0.1% saponin and 0.05% sodium azide, and analyzed by flow cytometry. Flow cytometric analyses are performed on a FACS cytometer (Becton Dickinson, San Jose, Calif., USA) with 488 nm argon laser excitation and emission is collected at 530+/−30 nm. FACS software is used for acquisition and analysis. The light scatter channels are set on linear gains, and the fluorescence channels are set on a logarithmic scale, with a minimum of 10,000 cells analyzed in each condition. Relative esterase activities are calculated based on the intensity of calcein-AM in each sample. All events are captured in the forward and side scatter channels (alternatively, a gate can be applied to select only the fusosome population). The fluorescence intensity (FI) value for the fusosomes is determined by subtracting the FI value of the respective negative control saponin-treated sample. The normalized esterase activity for the fusosomes samples are normalized to the respective positive control cell samples in order to generate quantitative measurements for cytosolic esterase activities.

[1139] In an embodiment, a fusosome preparation will have within 1%, 2%, 3%, 4%, 5%, 10%, 20%, 30%, 40%, 50%, 60%, 70%, 80%, 90%, 100% or greater esterase activity compared to the positive control cell.

[1140] See also, Bratosin D, Mitrofan L, Palii C, Estaquier J, Montreuil J. Novel fluorescence assay using calcein-AM for the determination of human erythrocyte viability and aging. Cytometry A. 2005 July; 66(1):78-84; and Jacob B C, Favre M, Bensa J C. Membrane cell permeabilisation with saponin and multiparametric analysis by flow cytometry. Cytometry 1991;12:550-558.

### Example 52: Measuring Acetylcholinesterase Activity in Fusosomes

[1141] Acetylcholinesterase activity is measured using a kit (MAK119, SIGMA) that follows a procedure described previously (Ellman, et al., Biochem. Pharmacol. 7, 88, 1961) and following the manufacturer's recommendations.

[1142] Briefly, fusosomes are suspended in 1.25 mM acetylthiocholine in PBS, pH 8, mixed with 0.1 mM 5,5-dithio-bis(2-nitrobenzoic acid) in PBS, pH 7. The incubation is performed at room temperature but the fusosomes and the substrate solution are pre-warmed at 37° C. for 10 min before starting the optical density readings.

[1143] Changes in absorption are monitored at 450 nm for 10 min with a plate reader spectrophotometer (ELX808, BIO-TEK instruments, Winooski, Vt., USA). Separately, a sample is used for determining the protein content of the fusosomes via bicinchoninic acid assay for normalization. Using this assay, the fusosomes are determined to have <100 AChE activity units/μg of protein.

[1144] In an embodiment, AChE activity units/μg of protein values will be less than 0.001, 0.01, 0.1, 1, 10, 100, or 1000.

### Example 53: Measuring Metabolic Activity Level

[1145] This Example describes quantification of the measurement of citrate synthase activity in fusosomes.

[1146] Citrate synthase is an enzyme within the tricarboxylic acid (TCA) cycle that catalyzes the reaction between oxaloacetate (OAA) and acetyl-CoA to generate citrate. Upon hydrolysis of acetyl-CoA, there is a release of CoA with a thiol group (CoA-SH). The thiol group reacts with a chemical reagent, 5,5-Dithiobis-(2-nitrobenzoic acid) (DTNB), to form 5-thio-2-nitrobenzoic acid (TNB), which is a yellow product that can be measured spectrophotometrically at 412 nm (Green 2008). Commercially-available kits, such as the Abcam Human Citrate Synthase Activity Assay Kit (Product #ab119692) provide all the necessary reagents to perform this measurement.

[1147] The assay is performed as per the manufacturer's recommendations. Fusosome sample lysates are prepared by collecting the fusosomes as produced by any one of the methods described in previous Examples and solubilizing them in Extraction Buffer (Abcam) for 20 minutes on ice. Supernatants are collected after centrifugation and protein content is assessed by bicinchoninic acid assay (BCA, ThermoFisher Scientific) and the preparation remains on ice until the following quantification protocol is initiated.

[1148] Briefly, fusosome lysate samples are diluted in 1× Incubation buffer (Abcam) in the provided microplate wells, with one set of wells receiving only 1× Incubation buffer. The plate is sealed and incubated for 4 hours at room temperature with shaking at 300 rpm. The buffer is then aspirated from the wells and 1× Wash buffer is added. This washing step is repeated once more. Then, 1× Activity solution is added to each well, and the plate is analyzed on a microplate reader by measuring absorbance at 412 nm every 20 seconds for 30 minutes, with shaking between readings.

[1149] Background values (wells with only 1× Incubation buffer) are subtracted from all wells, and the citrate synthase activity is expressed as the change in absorbance per minute per μg of fusosome lysate sample loaded (ΔmOD@412 nm/min/ug protein). Only the linear portion from 100-400 seconds of the kinetic measurement is used to calculate the activity.

[1150] In an embodiment, a fusosome preparation will have within 1%, 2%, 3%, 4%, 5%, 10%, 20%, 30%, 40%, 50%, 60%, 70%, 80%, 90%, 100% or greater synthase activity compared to the control cell.

[1151] See, for example, Green H J et al. Metabolic, enzymatic, and transporter response in human muscle during three consecutive days of exercise and recovery. Am J Physiol Regul Integr Comp Physiol 295: R1238-R1250, 2008.

### Example 54: Measuring Respiration Levels

[1152] This Example describes quantification of the measurement of respiration level in fusosomes. Respiration level in cells can be a measure of oxygen consumption, which powers metabolism. Fusosome respiration is measured for oxygen consumption rates by a Seahorse extracellular flux analyzer (Agilent) (Zhang 2012).

[1153] Fusosomes as produced by any one of the methods described in previous Examples or cells are seeded in a 96-well Seahorse microplate (Agilent). The microplate is centrifuged briefly to pellet the fusosomes and cells at the bottom of the wells. Oxygen consumption assays are initiated by removing growth medium, replacing with a low-buffered DMEM minimal medium containing 25 mM glucose and 2 mM glutamine (Agilent) and incubating the microplate at 37° C. for 60 minutes to allow for temperature and pH equilibrium.

[1154] The microplate is then assayed in an extracellular flux analyzer (Agilent) that measures changes in extracellular oxygen and pH in the media immediately surrounding adherent fusosomes and cells. After obtaining steady state oxygen consumption (basal respiration rate) and extracellular acidification rates, oligomycin (5 μM), which inhibits ATP synthase, and proton ionophore FCCP (carbonyl cyanide 4-(trifluoromethoxy) phenylhydrazone; 2 μM), which uncouples mitochondria, are added to each well in the microplate to obtain values for maximal oxygen consumption rates.

[1155] Finally, 5 μM antimycin A (inhibitor of mitochondria complex III) is added to confirm that respiration changes are due mainly to mitochondrial respiration. The minimum rate of oxygen consumption after antimycin A addition is subtracted from all oxygen consumption measurements to remove the non-mitochondrial respiration component. Cell samples that do not appropriately respond to oligomycin (at least a 25% decrease in oxygen consumption rate from basal) or FCCP (at least a 50% increase in oxygen consumption rate after oligomycin) are excluded from the analysis. Fusosomes respiration level is then measured as pmol O2/min/1e4 fusosomes.

[1156] This respiration level is then normalized to the respective cell respiration level. In an embodiment, fusosomes will have at least 1%, 2%, 3%, 4%, 5%, 10%, 20%, 30%, 40%, 50%, 60%, 70%, 80%, 90%, 100% or greater respiration level compared to the respective cell samples.

[1157] See, for example, Zhang J, Nuebel E, Wisidagama D R R, et al. Measuring energy metabolism in cultured cells, including human pluripotent stem cells and differentiated cells. Nature protocols. 2012; 7(6):10.1038/nprot.2012.048. doi:10.1038/nprot.2012.048.

### Example 55: Measuring Phosphatidylserine Levels of Fusosomes

[1158] This Example describes quantification of the level of annexin-V binding to the surface of fusosomes.

[1159] Dying cells can display phosphatidylserine on the cell surface which is a marker of apoptosis in the programmed cell death pathway. Annexin-V binds to phosphatidylserine, and thus, annexin-V binding is a proxy for viability in cells.

[1160] Fusosomes were produced as described herein. For detection of apoptosis signals, fusosomes or positive control cells were stained with 5% annexin V fluor 594 (A13203, Thermo Fisher, Waltham, Mass.). Each group (detailed in the table below) included an experimental arm that was treated with an apoptosis-inducer, menadione. Menadione was added at 100 μM menadione for 4 h. All samples were run on a flow cytometer (Thermo Fisher, Waltham, Mass.) and fluorescence intensity was measured with the YL1 laser at a wavelength of 561 nm and an emission filter of 585/16 nm. The presence of extracellular phophatidyl serine was quantified by comparing fluorescence intensity of annexin V in all groups.

[1161] The negative control unstained fusosomes were not positive for annexin V staining.

[1162] In an embodiment, fusosomes were capable of upregulating phosphatidylserine display on the cell surface in response to menadione, indicating that non-menadione stimulated fusosomes are not undergoing apoptosis. In an embodiment, positive control cells that were stimulated with menadione demonstrated higher-levels of annexin V staining than fusosomes not stimulated with menadione.

TABLE 8
Annexin V staining parameter

| | Mean Fluorescence Intensity | |
|---|---|---|
| | of Annexin V Signal | |
| Experimental Arm | (and standard deviation) | |
| Unstained Fusosomes (negative | 941 | (937) |
| control) | | |
| Stained Fusosomes | 11257 | (15826) |
| Stained Fusosomes + | 18733 | (17146) |
| Menadione | | |
| Stained Macrophages + | 14301 | (18142) |
| Menadione (positive control) | | |

### Example 56: Measuring Juxtacrine-Signaling Levels

[1163] This Example describes quantification of juxtacrine-signaling in fusosomes.

[1164] Cells can form cell-contact dependent signaling via juxtacrine signaling. In an embodiment, presence of juxtacrine signaling in fusosomes will demonstrate that fusosomes can stimulate, repress, and generally communicate with cells in their immediate vicinity.

[1165] Fusosomes produced by any one of the methods described in previous Examples from mammalian bone marrow stromal cells (BMSCs) having partial or complete nuclear inactivation trigger IL-6 secretion via juxtacrine signaling in macrophages. Primary macrophages and BMSCs are co-cultured. Bone marrow-derived macrophages are seeded first into 6-well plates, and incubated for 24 h, then primary mouse BMSC-derived fusosomes or BMSC cells (positive control parental cells) are placed on the macrophages in a DMEM medium with 10% FBS. The supernatant is collected at different time points (2, 4, 6, 24 hours) and analyzed for IL-6 secretion by ELISA assay. (Chang J. et al., 2015).

[1166] In an embodiment, the level of juxtacrine signaling induced by BMSC fusosomes is measured by an increase in macrophage-secreted IL-6 levels in the media. In an embodiment, the level of juxtacrine signaling will be at least 1%, 2%, 3%, 4%, 5%, 10%, 20%, 30%, 40%, 50%, 60%, 70%, 80%, 90%, 100% or greater than the levels induced by the positive control bone marrow stromal cells (BMSCs).

### Example 57: Measuring Paracrine-Signaling Levels

[1167] This Example describes quantification of paracrine signaling in fusosomes.

[1168] Cells can communicate with other cells in the local microenvironment via paracrine signaling. In an embodiment, fusosomes will be capable of paracrine signaling, e.g., to communicate with cells in their local environment. In an embodiment, the ability of fusosomes to trigger Ca²⁺ signaling in endothelial cells via paracrine-derived secretion with the following protocol will measure Ca²⁺ signaling via the calcium indicator, fluo-4 AM.

[1169] To prepare the experimental plate, murine pulmonary microvascular endothelial cells (MPMVECs) are plated on a 0.2% gelatin coated 25 mm glass bottom confocal dish (80% confluence). MPMVECs are incubated at room temperature for 30 min in ECM containing 2% BSA and 0.003% pluronic acid with 5 μM fluo-4 AM (Invitrogen) final concentration to allow loading of fluo-4 AM. After loading, MPMVECs are washed with experimental imaging solution (ECM containing 0.25% BSA) containing sulfinpyrazone to minimize dye loss. After loading fluo-4, 500 μl of pre-warmed experimental imaging solution is added to the plate, and the plate is imaged by a Zeiss confocal imaging system.

[1170] In a separate tube, freshly isolated murine macrophages are either treated with 1 μg/ml LPS in culture media (DMEM+10% FBS) or not treated with LPS (negative control). After stimulation, fusosomes are generated from macrophages by any one of the methods described in previous Examples.

[1171] Fusosomes or parental macrophages (positive control) are then labeled with cell tracker red, CMTPX (Invitrogen), in ECM containing 2% BSA and 0.003% pluronic acid. Fusosomes and macrophages are then washed and resuspended in experimental imaging solution. Labeled fusosomes and macrophages are added onto the fluo-4 AM loaded MPMVECs in the confocal plate.

[1172] Green and red fluorescence signal is recorded every 3 s for 10-20 min using Zeiss confocal imaging system with argon ion laser source with excitation at 488 and 561 nm for fluo-4 AM and cell tracker red fluorescence respectively. Fluo-4 fluorescence intensity changes are analyzed using imaging software (Mallilankaraman, K. et al., J Vis Exp. (58): 3511, 2011). The level of Fluo-4 intensity measured in negative control fusosome and cell groups is subtracted from LPS-stimulated fusosome and cell groups.

[1173] In an embodiment, fusosomes, e.g., activated fusosomes, will induce an increase in Fluo-4 fluorescence intensity that is at least 1%, 2%, 3%, 4%, 5%, 10%, 20%, 30%, 40%, 50%, 60%, 70%, 80%, 90%, 100% or greater than the positive control cell groups.

### Example 58: Measuring Ability to Polymerize Actin for Mobility

[1174] This Example describes quantification of cytoskeletal components, such as actin, in fusosomes. In an embodiment, fusosomes comprise cytoskeletal components such as actin, and are capable of actin polymerization.

[1175] Cells use actin, which is a cytoskeletal component, for motility and other cytoplasmic processes. The cytoskeleton is essential to creating motility driven forces and coordinating the process of movement

[1176] C2C12 cells were enucleated as described herein. Fusosomes obtained from the 12.5% and 15% Ficoll layers were pooled and labeled ‘Light’, while fusosomes from the 16-17% layers were pooled and labeled ‘Medium’. Fusosomes or cells (parental C2C12 cells, positive control) were resuspended in DMEM+Glutamax+10% Fetal Bovine Serum (FBS), plated in 24-well ultra-low attachment plates (#3473, Corning Inc, Corning, N.Y.) and incubated at 37° C.+5% CO₂. Samples were taken periodically (5.25 hr, 8.75 hr, 26.5 hr) and stained with 165 μM rhodamine phalloidin (negative control was not stained) and measured on a flow cytometer (#A24858, Thermo Fisher, Waltham, Mass.) with a FC laser YL1 (561 nm with 585/16 filter) to measure F-actin cytoskeleton content. The fluorescence intensity of rhodamine phalloidin in fusosomes was measured along with unstained fusosomes and stained parental C2C12 cells.

[1177] Fusosome fluorescence intensity was greater (FIG. 1) than the negative control at all timepoints, and fusosomes were capable of polymerizing actin at a similar rate to the parental C2C12 cells.

[1178] Additional cytoskeletal components, such as those listed in the table below, are measured via a commercially available ELISA systems (Cell Signaling Technology and MyBioSource), according to manufacturer's instructions.

TABLE 9
Cytoskeletal components

| Cytoskeletal | | |
|---|---|---|
| protein measured | Commercial Kit Type | Kit ID |
| Actin | Path Scan Total B-Actin | Cell Signaling, |
| | Sandwich ELISA Kit | 7880 |
| Arp2/3 | Human Actin Related protein | MyBioSource, |
| | 2/3 complex subunit(APRC2) | MBS7224740 |
| | ELISA KIT | |
| Formin | Formin Binding Protein 1 | MyBioSource, |
| | (FNBP1), ELISA Kit | MBS9308864 |
| Coronin | Human Coronin 1A ELISA Kit | MyBioSource, |
| | | MBS073640 |
| Dystrophin | Human dystrophin ELISA Kit | MyBioSource |
| | | MBS722223 |
| Keratin | Human Keratin 5 ELISA Kit | MyBioSource, |
| | | MBS081200 |
| Myosin | Human Myosin IG (MYO1G) | MyBioSource, |
| | ELISA Kit | MBS9312965 |
| Tubulin | Human Tubulin Beta 3 ELISA | MyBioSource, |
| | Kit | MBS097321 |

[1179] Then 100 uL of appropriately-diluted lysate is added to the appropriate well from the microwell strips. The microwells are sealed with tape and incubated for 2 hrs at 37 C. After incubation, the sealing tape is removed and the contents are discarded. Each microwell is washed four times with 200 uL of 1× Wash Buffer. After each individual wash, plates are struck onto an absorbent cloth so that the residual wash solution is removed from each well. However, wells are not completely dry at any time during the experiment.

[1180] Next, 100 ul of the reconstituted Detection Antibody (green) is added each individual well, except for negative control wells. Then wells are sealed and incubated for 1 hour at 37° C. The washing procedure is repeated after incubation is complete. 100 uL of reconstituted HRP-Linked secondary antibody (red) is added to each of the wells. The wells are sealed with tape and incubated for 30 minutes at 37° C. The sealing tape is then removed and the washing procedure is repeated. 100 uL of TMB Substrate is then added to each well. The wells are sealed with tape, then incubated for 10 minutes at 37° C. Once this final incubation is complete, 100 uL of STOP solution is added to each of the wells and the plate is shaken gently for several seconds.

[1181] Spectrophotometric analysis of the assay is conducted within 30 minutes of adding the STOP solution. The underside of the wells is wiped with lint-free tissue and then absorbance is read at 450 nm. In an embodiment, fusosome samples that have been stained with the detection antibody will absorb more light at 450 nm that negative control fusosome samples, and absorb less light than cell samples that have been stained with the detection antibody.

### Example 59: Measuring Average Membrane Potential

[1182] This Example describes quantification of the mitochondrial membrane potential of fusosomes. In an embodiment, fusosomes comprising a mitochondrial membrane will maintain mitochondrial membrane potential.

[1183] Mitochondrial metabolic activity can be measured by mitochondrial membrane potential. The membrane potential of the fusosome preparation is quantified using a commercially available dye, TMRE, for assessing mitochondrial membrane potential (TMRE: tetramethyl rhodamine, ethyl ester, perchlorate, Abcam, Cat #T669).

[1184] Fusosomes are generated by any one of the methods described in previous Examples. Fusosomes or parental cells are diluted in growth medium (phenol-red free DMEM with 10% fetal bovine serum) in 6 aliquots (untreated and FCCP-treated triplicates). One aliquot of the samples is incubated with FCCP, an uncoupler that eliminates mitochondrial membrane potential and prevents TMRE staining. For FCCP-treated samples, 2 μM FCCP is added to the samples and incubated for 5 minutes prior to analysis. Fusosomes and parental cells are then stained with 30 nM TMRE. For each sample, an unstained (no TMRE) sample is also prepared in parallel. Samples are incubated at 37° C. for 30 minutes. The samples are then analyzed on a flow cytometer with 488 nm argon laser, and excitation and emission is collected at 530+/−30 nm.

[1185] Membrane potential values (in millivolts, mV) are calculated based on the intensity of TMRE. All events are captured in the forward and side scatter channels (alternatively, a gate can be applied to exclude small debris). The fluorescence intensity (FI) value for both the untreated and FCCP-treated samples are normalized by subtracting the geometric mean of the fluorescence intensity of the unstained sample from the geometric mean of the untreated and FCCP-treated sample. The membrane potential state for each preparation is calculated using the normalized fluorescent intensity values with a modified Nernst equation (see below) that can be used to determine mitochondrial membrane potential of the fusosomes or cells based on TMRE fluorescence (as TMRE accumulates in mitochondria in a Nernstian fashion).

[1186] Fusosome or cell membrane potential is calculated with the following formula: (mV)=−61.5*log(Fluntreated-normalized/FIFCCP-treated-normalized). In an embodiment, using this assay on fusosome preparations from C2C12 mouse myoblast cells, the membrane potential state of the fusosome preparation will be within about 1%, 2%, 3%, 4%, 5%, 10%, 20%, 30%, 40%, 50%, 60%, 70%, 80%, 90%, 100% or greater than the parental cells. In an embodiment, the range of membrane potential is about −20 to −150 mV.

### Example 60: Measuring Persistence Half-Life in a Subject

[1187] This Example describes the measurement of fusosome half-life.

[1188] Fusosomes are derived from cells that express Gaussia luciferase produced by any one of the methods described in previous Examples, and pure, 1:2, 1:5, and 1:10 dilutions in buffered solution are made. A buffered solution lacking fusosomes is used as a negative control.

[1189] Each dose is administered to three eight week old male C57BL/6J mice (Jackson Laboratories) intravenously. Blood is collected from the retro-orbital vein at 1, 2, 3, 4, 5, 6, 12, 24, 48, and 72 hours after intravenous administration of the fusosomes. The animals are sacrificed at the end of the experiment by CO₂ inhalation.

[1190] Blood is centrifuged for 20 min at room temperature. The serum samples are immediately frozen at −80° C. until bioanalysis. Then, each blood sample is used to carry out a Gaussia luciferase activity assay after mixing the samples with Gaussia luciferase substrate (Nanolight, Pinetop, Ariz.). Briefly, colenterazine, a luciferin or light-emitting molecule, is mixed with flash assay buffer and the mixture is pipetted into wells containing blood samples in a 96 well plate. Negative control wells that lack blood contain assay buffer to determine background Gaussia luciferase signal.

[1191] In addition, a standard curve of positive-control purified Gaussia luciferase (Athena Enzyme Systems, catalog #0308) is prepared in order to convert the luminescence signal to molecules of Gaussia luciferase secretion per hour. The plate is assayed for luminescence, using 500 msec integration. Background Gaussia luciferase signal is subtracted from all samples and then a linear best-fit curve is calculated for the Gaussia luciferase standard curve. If sample readings do not fit within the standard curve, they are diluted appropriately and re-assayed. The luciferase signal from samples taken at 1, 2, 3, 4, 5, 6, 12, 24, 48, and 72 hours is interpolated to the standard curve. The elimination rate constant kₑ (h⁻¹) is calculated using the following equation of a one-compartment model: C(t)=C₀×e^{-kext}, in which C(t) (ng/mL) is the concentration of fusosomes at time t (h) and C₀ the concentration of fusosomes at time=0 (ng/mL). The elimination half-life t_{1/2,e} (h) is calculated as ln(2)/kₑ.

[1192] In an embodiment, fusosomes will have a half-life of at least 1%, 2%, 3%, 4%, 5%, 10%, 20%, 30%, 40%, 50%, 60%, 70%, 80%, 90%, 100% or greater than the negative control cells.

### Example 61: Delivery of Fusosomes Via Non-Endocytic Pathway

[1193] This example describes quantification of fusosome delivery of Cre to a recipient cell via a non-endocytic pathway.

[1194] In an embodiment, fusosomes will deliver agents via a fusosome-mediated, non-endocytic pathway. Without wishing to be bound by theory, delivery of an agent, e.g., Cre, which is carried within the lumen of the fusosomes, directly to the cytosol of the recipient cells without any requirement for endocytosis-mediated uptake of the fusosomes, will occur through a fusosome-mediated, non-endocytic pathway delivery.

[1195] In this example, the fusosome comprises a HEK293T cell expressing the Sendai virus H and F protein on its plasma membrane (Tanaka et al., 2015, Gene Therapy, 22(October 2014), 1-8. https://doi.org/10.1038/gt.2014.123). In addition, the fusosome expresses mTagBFP2 fluorescent protein and Cre recombinase. The target cell is a RPMI8226 cell which stably-expresses “LoxP-GFP-stop-LoxP-RFP” cassette under a CMV promoter, which upon recombination by Cre switches from GFP to RFP expression, indicating fusion and Cre, as a marker, delivery.

[1196] Fusosomes produced by the herein described methods are assayed for delivery of Cre via a non-endocytic pathway as follows. The recipient cells are plated into a black, clear-bottom 96-well plate. Next, 24 hours after plating the recipient cells, the fusosomes expressing Cre recombinase protein and possessing the particular fusogen protein are applied to the recipient cells in DMEM media. To determine the level of Cre delivery via a non-endocytic pathway, a parallel group of recipient cells receiving fusosomes is treated with an inhibitor of endosomal acidification, chloroquine (30 μg/mL). The dose of fusosomes is correlated to the number of recipient cells plated in the well. After applying the fusosomes, the cell plate is centrifuged at 400 g for 5 minutes to help initiate contact between the fusosomes and the recipient cells. The cells are then incubated for 16 hours and agent delivery, Cre, is assessed via imaging.

[1197] The cells are imaged to positively identify RFP-positive cells versus GFP-positive cells in the field or well. In this example cell plates are imaged using an automated fluorescence microscope. The total cell population in a given well is determined by first staining the cells with Hoechst 33342 in DMEM media for 10 minutes. Hoechst 33342 stains cell nuclei by intercalating into DNA and therefore is used to identify individual cells. After staining, the Hoechst media is replaced with regular DMEM media.

[1198] The Hoechst is imaged using the 405 nm LED and DAPI filter cube. GFP is imaged using the 465 nm LED and GFP filter cube, while RFP is imaged using 523 nm LED and RFP filter cube. Images of the different cell groups are acquired by first establishing the LED intensity and integration times on a positive-control well; i.e., recipient cells treated with adenovirus coding for Cre recombinase instead of fusosomes.

[1199] Acquisition settings are set so that RFP and GFP intensities are at the maximum pixel intensity values but not saturated. The wells of interest are then imaged using the established settings.

[1200] Analysis of GFP and RFP-positive wells is performed with software provided with the fluorescence microscope or other software (Rasband, W. S., ImageJ, U. S. National Institutes of Health, Bethesda, Md., USA, 1997-2007). The images are pre-processed using a rolling ball background subtraction algorithm with a 60 μm width. The total cell mask is set on the Hoechst-positive cells. Cells with Hoechst intensity significantly above background intensities are used to set a threshold, and areas too small or large to be Hoechst-positive cells are excluded.

[1201] Within the total cell mask, GFP and RFP-positive cells are identified by again setting a threshold for cells significantly above background and extending the Hoechst (nuclei) masks for the entire cell area to include the entire GFP and RFP cellular fluorescence.

[1202] The number of RFP-positive cells identified in control wells containing recipient cells is used to subtract from the number of RFP-positive cells in the wells containing fusosomes (to subtract for non-specific Loxp recombination). The number of RFP-positive cells (recipient cells that received Cre) is then divided by the sum of GFP-positive cells (recipient cells that have not received Cre) and RFP-positive cells to quantify the fraction of fusosome Cre delivered to the recipient cell population. The level is normalized to the given dose of fusosomes applied to the recipient cells. To calculate the value of fusosome Cre delivered via a non-endocytic pathway, the level of fusosome Cre delivery in the presence of chloroquine (FusL+CQ) is determined as well as the level of fusosome Cre delivery in the absence of chloroquine (FusL−CQ). To determine the normalized value of fusosome Cre delivered via a non-endocytic pathway, the following equation is used: [(FusL−CQ)−(FusL+CQ)]/(FusL−CQ).

[1203] In an embodiment, the average level of fusosome Cre delivered via a non-endocytic pathway for a given fusosome will be in the range of 0.1-0.95, or at least 1%, 2%, 3%, 4%, 5%, 10%, 20%, 30%, 40%, 50%, 60%, 70%, 80%, 90% or greater than chloroquine treated recipient cells.

### Example 62: Delivery of Fusosomes Via Endocytic Pathway

[1204] This example describes fusosome delivery of Cre to a recipient cell via an endocytic pathway.

[1205] In an embodiment, fusosomes will deliver agents via a fusosome-mediated, endocytic pathway. Without wishing to be bound by theory, delivery of an agent, e.g., a cargo, carried in the lumen of the fusosomes, to the recipient cells with the route of uptake being endocytosis-dependent will occur through a fusosome-mediated, endocytic pathway delivery.

[1206] In this example the fusosome comprises microvesicles that were produced by extruding a HEK293T cell expressing a fusogen protein on its plasma membrane through a 2 μm filter (Lin et al., 2016, Biomedical Microdevices, 18(3). doi.org/10.1007/s10544-016-0066-y) (Riedel, Kondor-Koch, & Garoff, 1984, The EMBO Journal, 3(7), 1477-83. Retrieved from www.ncbi.nlm.nih.gov/pubmed/6086326). In addition, the fusosome expresses mTagBFP2 fluorescent protein and Cre recombinase. The target cell is a PC3 cell which stably-expresses “LoxP-GFP-stop-LoxP-RFP” cassette under a CMV promoter, which upon recombination by Cre switches from GFP to RFP expression, indicating fusion and Cre, as a marker, delivery.

[1207] Fusosomes produced by the herein described methods are assayed for delivery of Cre via an endocytic pathway as follows. The recipient cells are plated into a cell culture multi-well plate compatible with the imaging system to be used (in this example cells are plated in a black, clear-bottom 96-well plate). Next, 24 hours after plating the recipient cells, the fusosomes expressing Cre recombinase protein and possessing the particular fusogen protein are applied to the recipient cells in DMEM media. To determine the level of Cre delivery via an endocytic pathway, a parallel group of recipient cells receiving fusosomes is treated with an inhibitor of endosomal acidification, chloroquine (30 μg/mL). The dose of fusosomes is correlated to the number of recipient cells plated in the well. After applying the fusosomes, the cell plate is centrifuged at 400 g for 5 minutes to help initiate contact between the fusosomes and the recipient cells. The cells are then incubated for 16 hours and agent delivery, Cre, is assessed via imaging.

[1208] The cells are imaged to positively identify RFP-positive cells versus GFP-positive cells in the field or well. In this example cell plates are imaged using an automated fluorescent microscope. The total cell population in a given well is determined by first staining the cells with Hoechst 33342 in DMEM media for 10 minutes. Hoechst 33342 stains cell nuclei by intercalating into DNA and therefore is used to identify individual cells. After staining the Hoechst media is replaced with regular DMEM media.

[1209] The Hoechst is imaged using the 405 nm LED and DAPI filter cube. GFP is imaged using the 465 nm LED and GFP filter cube, while RFP is imaged using 523 nm LED and RFP filter cube. Images of the different cell groups are acquired by first establishing the LED intensity and integration times on a positive-control well; i.e., recipient cells treated with adenovirus coding for Cre recombinase instead of fusosomes.

[1210] Acquisition settings are set so that RFP and GFP intensities are at the maximum pixel intensity values but not saturated. The wells of interest are then imaged using the established settings.

[1211] Analysis of GFP and RFP-positive wells is performed with software provided with the fluorescent microscope or other software (Rasband, W. S., ImageJ, U. S. National Institutes of Health, Bethesda, Md., USA, 1997-2007). The images are pre-processed using a rolling ball background subtraction algorithm with a 60 μm width. The total cell mask is set on the Hoechst-positive cells. Cells with Hoechst intensity significantly above background intensities are thresholded and areas too small or large to be Hoechst-positive cells are excluded.

[1212] Within the total cell mask, GFP and RFP-positive cells are identified by again thresholding for cells significantly above background and extending the Hoechst (nuclei) masks for the entire cell area to include the entire GFP and RFP cellular fluorescence.

[1213] The number of RFP-positive cells identified in control wells containing recipient cells is used to subtract from the number of RFP-positive cells in the wells containing fusosomes (to subtract for non-specific Loxp recombination). The number of RFP-positive cells (recipient cells that received Cre) is then divided by the sum of the GFP-positive cells (recipient cells that have not received Cre) and RFP-positive cells to quantify the fraction of fusosome Cre delivered to the recipient cell population. The level is normalized to the given dose of fusosomes applied to the recipient cells. To calculate the value of fusosome Cre delivered via an endocytic pathway, the level of fusosome Cre delivery in the presence of chloroquine (FusL+CQ) is determined as well as the level of fusosome Cre delivery in the absence of chloroquine (FusL−CQ). To determine the normalized value of fusosome Cre delivered via an endocytic pathway, the following equation is used: (FusL+CQ)/(FusL−CQ).

[1214] In an embodiment, the average level of fusosome Cre delivered via an endocytic pathway for a given fusosome will be in the range of 0.01-0.6, or at least 1%, 2%, 3%, 4%, 5%, 10%, 20%, 30%, 40%, 50%, 60%, 70%, 80%, 90% or greater than chloroquine treated recipient cells.

### Example 63: Delivery of Fusosomes Via a Dynamin Mediated Pathway, a Macropinocytosis Pathway, or an Actin Mediated Pathway

[1215] This example describes fusosome delivery of Cre to a recipient cell via a dynamin mediated pathway. A fusosome comprising a microvesicle may be produced as described in the preceding example. Fusosomes are assayed for delivery of Cre via a dynamin-mediated pathway according to the preceding example, except that a group of recipient cells receiving fusosomes is treated with an inhibitor of dynamin, Dynasore (120 μM). To calculate the value of fusosome Cre delivered via a dynamin-mediated pathway, the level of fusosome Cre delivery in the presence of Dynasore (FusL+DS) is determined as well as the level of fusosome Cre delivery in the absence of Dynasore (FusL−DS). The normalized value of fusosome Cre delivered may be calculated as described in the preceding example.

[1216] This example also describes delivery of Cre to a recipient cell via macropinocytosis. A fusosome comprising a microvesicle may be produced as described in the preceding example. Fusosomes are assayed for delivery of Cre via macropinocytosis according to the preceding example, except that a group of recipient cells receiving fusosomes is treated with an inhibitor of macropinocytosis, 5-(N-ethyl-N-isopropyl)amiloride (EIPA) (25 μM). To calculate the value of fusosome Cre delivered via macropinocytosis, the level of fusosome Cre delivery in the presence of EIPA (FusL+EPIA) is determined as well as the level of fusosome Cre delivery in the absence of EPIA (FusL−EIPA). The normalized value of fusosome Cre delivered may be calculated as described in the preceding example.

[1217] This example also describes fusosome delivery of Cre to a recipient cell via an actin mediated pathway. A fusosome comprising a microvesicle may be produced as described in the preceding example. Fusosomes are assayed for delivery of Cre via macropinocytosis according to the preceding example, except that a group of recipient cells receiving fusosomes is treated with an inhibitor of actin polymerization, Latrunculin B (6 μM). To calculate the value of fusosome Cre delivered via an actin-mediated pathway, the level of fusosome Cre delivery in the presence of Latrunculin B (FusL+LatB) is determined as well as the level of fusosome Cre delivery in the absence of Latrunculin B (FusL−LatB). The normalized value of fusosome Cre delivered may be calculated as described in the preceding example.

### Example 64: In Vivo Delivery of Protein

[1218] This example describes the delivery of therapeutic agents to the eye by fusosomes.

[1219] Fusosomes are derived from hematopoietic stem and progenitor cells using any of the methods described in previous Examples and are loaded with a protein that is deficient in a mouse knock-out.

[1220] Fusosomes are injected subretinally into the right eye of a mouse that is deficient for the protein and vehicle control is injected into the left eye of the mice. A subset of the mice is euthanized when they reach 2 months of age.

[1221] Histology and H&E staining of the harvested retinal tissue is conducted to count the number of cells rescued in each retina of the mice (described in Sanges et al., The Journal of Clinical Investigation, 126(8): 3104-3116, 2016).

[1222] The level of the injected protein is measured in retinas harvested from mice euthanized at 2 months of age via a western blot with an antibody specific to the PDE6B protein.

[1223] In an embodiment, the left eyes of mice, which are administered fusosomes, will have an increased number of nuclei present in the outer nuclear level of the retina compared to the right eyes of mice, which are treated with vehicle. The increased protein is suggestive of complementation of the mutated PBE6B protein.

### Example 65: Assessment of Teratoma Formation after Administration of Fusosome

[1224] This Example describes the absence of teratoma formation with a fusosome. In an embodiment, a fusosome will not result in teratoma formation when administered to a subject.

[1225] The fusosomes are produced by any one of the methods described in a previous Example. Fusosomes, tumor cells (positive control) or vehicle (negative control) are subcutaneously injected in PBS into the left flank of mice (12-20 weeks old). Teratoma, e.g., tumor, growth is analyzed 2-3 times a week by determination of tumor volume by caliper measurements for eight weeks after fusosome, tumor cell, or vehicle injection.

[1226] In an embodiment, mice administered fusosomes or vehicle will not have a measurable tumor formation, e.g., teratoma, via caliper measurements. In an embodiment, positive control animals treated with tumor cells will demonstrate an appreciable tumor, e.g., teratoma, size as measured by calipers over the eight weeks of observation.

### Example 66: Measuring Total RNA in a Fusosome and Source Cell

[1227] This Example describes a method to quantify the amount of RNA in a fusosome relative to a source cell. In an embodiment, a fusosome will have similar RNA levels to the source cell. In this assay, RNA levels are determined by measuring total RNA.

[1228] Fusosomes are prepared by any one of the methods described in previous Examples. Preparations of the same mass as measured by protein of fusosomes and source cells are used to isolate total RNA (e.g., using a kit such as Qiagen RNeasy catalog #74104), followed by determination of RNA concentration using standard spectroscopic methods to assess light absorbance by RNA (e.g. with Thermo Scientific NanoDrop).

[1229] In an embodiment, the concentration of RNA in fusosomes will be 5%, 10%, 20%, 30%, 40%, 50%, 60%, 70%, 80%, 90%, 95% of that of source cells per mass of protein.

### Example 67: Isolating Fusogenic Microvesicles Freely Released from Cells

[1230] This example describes the isolation of fusogenic microvesicles freely released from cells. Fusogenic microvesicles were isolated as follows. 9.2×10⁶ HEK-293T (ATCC, Cat #CRL-3216) were reverse transfected using Xfect transfection reagent (Takara, Cat #631317) with 10 μg of the pcDNA3.1 expression plasmid containing the open reading frame for VSVg and 15 ug of the pcDNA3.1 expression plasmid containing the open reading frame for bacteriophage P1 Cre Recombinase with a SV40 Nuclear localization sequence in 7.5 mL of complete media (Dulbecco's Modified Eagle Medium (DMEM) supplemented with GlutaMAX (ThermoFisher), 10% fetal calf serum (ThermoFisher), and penicillin/streptomycin antibiotics (ThermoFisher)) in a 100 mm collagen coated dish (Corning). Twelve hours after seeding, an additional 7.5 mL of complete medium was carefully added. The cells were separated from culture media by centrifugation at 200×g for 10 minutes. Supernatants were collected and centrifuged sequentially twice at 500×g for 10 minutes, once at 2,000×g for 15 minutes, once at 10,000×g for 30 min, and once at 70,000×g for 60 minutes. Freely released fusosomes were pelleted during the final centrifugation step, resuspended in PBS and repelleted at 70,000×g. The final pellet was resuspended in PBS.

[1231] See also, Wubbolts R et al. Proteomic and Biochemical Analyses of Human B Cell-derived Exosomes: Potential Implications for their Function and Multivesicular Body Formation. J. Biol. Chem. 278:10963-10972 2003.

### Example 68: Measuring the Average Size Distribution of Fusosomes

[1232] This Example describes measurement of the size distribution of fusosomes.

[1233] Fusosomes were prepared as described herein by transient transfection of HEK293T with VSV-G, enucleation and subsequent fractionation with Ficoll. The fusosomes were measured to determine the size distribution using the method of Example 27, as shown in FIG. 3. It is contemplated that the fusosomes can have less than about 50%, 40%, 30%, 20%, 10%, 5%, or less of the parental cell's variability in size distribution within 90% of the sample. It is contemplated that the fusosomes can have 58% less of the parental cell's variability in size distribution within 90% of the sample.

### Example 69: Average Volume of Fusosomes

[1234] This example describes measurement of the average volume of fusosomes. Varying the size (e.g., volume) of fusosomes can make them versatile for distinct cargo loading, therapeutic design or application.

[1235] Fusosomes were prepared as described herein by transient transfection of HEK293T with VSV-G, enucleation and subsequent fractionation with Ficoll. The positive control was HEK293T cells.

[1236] Analysis with a combination of NTA and confocal microscopy as described in Example 27 was used to determine the size of the fusosomes. The diameter of the fusosomes were measured and the volume calculated, as shown in FIG. 4. It is contemplated that fusosomes can have an average size of greater than 50 nm in diameter. It is contemplated that fusosomes can have an average size of 129 nm in diameter.

### Example 70: Comparison of Soluble to Insoluble Protein Mass

[1237] This Example describes quantification of the soluble:insoluble ratio of protein mass in fusosomes. The soluble:insoluble ratio of protein mass in fusosomes can, in some instances, be similar to that of nucleated cells.

[1238] Fusosomes were prepared as described herein by transient transfection of HEK293T with VSV-G, enucleation and subsequent fractionation with Ficoll. The fusosome preparation was tested to determine the soluble:insoluble protein ratio using a standard bicinchoninic acid assay (BCA) (Pierce™ BCA Protein Assay Kit, Thermo Fischer product #23225). Soluble protein samples were prepared by suspending the prepared fusosomes or parental cells at a concentration of 1×10⁷ cells or ˜1 mg/mL total fusosomes in PBS and centrifuging at 1,500×g to pellet the cells or 16,000×g to pellet the fusosomes. The supernatant was collected as the soluble protein fraction.

[1239] The fusosomes or cells were then resuspended in PBS. This suspension represents the insoluble protein fraction.

[1240] A standard curve was generated using the supplied BSA, from 0 to 15 μg of BSA per well (in duplicate). The fusosome or cell preparation was diluted such that the quantity measured is within the range of the standards. The fusosome preparation was analyzed in duplicate and the mean value was used. The soluble protein concentration was divided by the insoluble protein concentration to yield the soluble:insoluble protein ratio (FIG. 5).

### Example 71: Measuring Fusion with a Target Cell

[1241] Fusosomes derived from HEK-293T cells expressing the engineered hemagglutinin glycoprotein of measles virus (MvH) and the fusion protein (F) on the cell surface and containing Cre recombinase protein were generated, as described herein. The MvH was engineered so that its natural receptor binding is ablated and target cell specificity is provided through a single-chain anbitody (scFv) that recognizes the cell surface antigen, in this case the scFv is designed to target CD8, a co-receptor for the T cell receptor. A control fusosome was used which was derived from HEK-293T cells expressing the fusogen VSV-G on its surface and containing Cre recombinase protein. The target cell was a HEK-293T cell engineered to express a “Loxp-GFP-stop-Loxp-RFP” cassette under CMV promoter, as well as engineered to over-express the co-receptors CD8a and CD8b. The non-target cell was the same HEK-293T cell expressing “Loxp-GFP-stop-Loxp-RFP” cassette but without CD8a/b over-expression. The target or non-target recipient cells were plated 30,000 cells/well into a black, clear-bottom 96-well plate and cultured in DMEM media with 10% fetal bovine serum at 37° C. and 5% CO₂. Four to six hours after plating the recipient cells, the fusosomes expressing Cre recombinase protein and MvH+F were applied to the target or non-target recipient cells in DMEM media. Recipient cells were treated with 10 μg of fusosomes and incubated for 24 hours at 37° C. and 5% CO₂.

[1242] Cell plates were imaged using an automated microscope (www.biotek.com/products/imaging-microscopy-automated-cell-imagers/lionheart-fx-automated-live-cell-imager/). The total cell population in a given well was determined by staining the cells with Hoechst 33342 in DMEM media for 10 minutes. Hoechst 33342 stains cell nuclei by intercalating into DNA and therefore is used to identify individual cells. The Hoechst was imaged using the 405 nm LED and DAPI filter cube. GFP was imaged using the 465 nm LED and GFP filter cube, while RFP was imaged using 523 nm LED and RFP filter cube. Images of target and non-target cell wells were acquired by first establishing the LED intensity and integration times on a positive-control well; i.e., recipient cells treated with adenovirus coding for Cre recombinase instead of fusosomes.

[1243] Acquisition settings were set so that Hoescht, RFP, and GFP intensities are at the maximum pixel intensity values but not saturated. The wells of interest were then imaged using the established settings. Focus was set on each well by autofocusing on the Hoescht channel and then using the established focal plane for the GFP and RFP channels. Analysis of GFP and RFP-positive cells was performed with Gen5 software provided with automated fluorescent microscope (https://www.biotek.com/products/software-robotics-software/gen5-microplate-reader-and-imager-software/).

[1244] The images were pre-processed using a rolling ball background subtraction algorithm with a 60 μm width. Cells with GFP intensity significantly above background intensities were thresholded and areas too small or large to be GFP-positive cells were excluded. The same analysis steps were applied to the RFP channel. The number of RFP-positive cells (recipient cells receiving Cre) was then divided by the sum of the GFP-positive cells (recipient cells that did not show delivery) and RFP-positive cells to quantify the percent RFP conversion, which describes the amount of fusosome fusion within the target and non-target recipient cell population. For amounts of targeted fusion (fusosome fusion to targeted recipient cells), the percent RFP conversion value is normalized to the percentage of recipient cells that are target recipient cells (i.e., expressing CD8), which was assessed by staining with anti-CD8 antibody conjugated to phycoerythrin (PE) and analyzed by flow cytometry. Finally, the absolute amount of targeted fusion was determined by subtracting the amount of non-target cell fusion from the target cell fusion amount (any value <0 was considered to be 0).

[1245] With this assay, the fusosome derived from a HEK-293T cell expressing the engineered MvH(CD8)+F on its surface and containing Cre recombinase protein showed a percentage RFP conversion of 25.2+/−6.4% when the recipient cell was the target HEK-293T cell expressing the “Loxp-GFP-stop-Loxp-RFP” cassette, and 51.1% of these recipient cells were observed to be CD8-positive. From these results, the normalized percentage RFP conversion or amount of targeted fusion was determined to be 49.3+/−12.7% for targeted fusion. The same fusosome showed a percentage RFP conversion of 0.5+/−0.1% when the recipient was the non-target HEK-293T cell expressing “Loxp-GFP-stop-Loxp-RFP” but with no expression of CD8. Based on the above, the absolute amount of targeted fusion for the MvH(CD8)+F fusosome determined to be 48.8% and the absolute amount of targeted fusion for the control VSV-G fusosome was determined to be 0% (FIG. 6).

### Example 72: Measuring Ability to Transport Glucose across Cell Membrane

[1246] Fusosomes from HEK-293T cells expressing the envelope glycoprotein G from vesicular stomatitis virus (VSV-G) on the cell surface and expressing Cre recombinase protein were generated according by the standard procedure of ultracentrifugation through a Ficoll gradient to obtain small particle fusosomes as described herein. To measure the ability of the fusosomes to transport glucose across the cell membrane, the levels of a 2-NBDG (2-(N-(7-Nitrobenz-2-oxa-1,3-diazol-4-yl)Amino)-2-Deoxyglucose) fluorescent glucose analog, that can be used to monitor glucose uptake in live cells, was quantified to assess active transport across the lipid bilayer. A commercially-available kit from Biovision Inc. (Cat #K682) was used for the assay according to manufacturer's instructions.

[1247] Briefly, the fusosome sample was measured for total protein content by bicinchoninic acid assay (BCA, ThermoFisher, Cat #23225) according to manufacturer's instructions. Next 40 ug of fusosome total protein was pelleted by centrifugation at 3000 g for 5 minutes in a table-top centrifuge, followed by resuspension in 400 uL of DMEM supplemented with 0.5% fetal bovine serum. This was done in duplicate for each sample, and one of the duplicates was treated with 4 uL of phloretin (provided with the kit), a natural phenol that inhibits glucose uptake, as a control for glucose uptake inhibition. The samples were then incubated for 1 hour at room temperature. After the incubation, the fusosome sample was pelleted and resuspended in 400 uL of glucose uptake mix prepared previously (see Table 10 below for formulation). Samples pre-treated with phloretin were resuspended in glucose uptake mix with phloretin; samples not pre-treated were resuspended in glucose uptake mix with 20 uL of PBS instead of phloretin. Also a parallel set of fusosome samples were resuspended in DMEM media with 0.5% FBS only as a negative control for flow cytometry analysis.

TABLE 10
Glucose uptake mix formulation

| Reagent | Volume (uL) |
|---|---|
| DMEM media with 0.5% FBS | 1880 |
| 2-NBDG reagent | 20 |
| Glucose Uptake Enhancer | 100 |
| Optional: Phloretin | 20 |

[1248] The samples were then incubated at 37° C. with 5% CO₂ for 30 minutes. After the incubation cells were pelleted, washed once with 1 mL of 1× Analysis Buffer (provided with kit), pelleted again, and resuspended in 400 uL of 1× Analysis Buffer.

[1249] The samples were then measured for 2-NBDG uptake by flow cytometry analysis using an Invitrogen Attune N×T acoustic focusing cytometer. 2-NBDG was excited with a 488 nm laser and emission captured at 513±26 nm. Forward and side scatter gating was initially used to capture fusosome-sized events and discard small debris. Events positive for 2-NBDG were determined by gating at the minimum level for which the 2-NBDG negative control sample showed <0.5% of events positive for 2-NBDG staining. The gated cells positive for 2-NBDG fluorescence were then assessed for the mean fluorescence intensity (F.I.) of 2-NBDG in order to calculate a value for glucose uptake for the fusosomes with and without phloretin treatment.

[1250] With this assay, the fusosome derived from a HEK-293T cell expressing the VSV-G and Cre showed a 2-NBDG mean F.I. of 631.0+/−1.4 without phloretin treatment and a mean F.I. of 565.5+/−4.9 with phloretin treatment (FIG. 7).

### Example 73: Measuring Esterase Activity in the Cytosol

[1251] Fusosomes from C2C12 cells were generated according to the standard procedure of ultracentrifugation through a Ficoll gradient to obtain small particle fusosomes as described herein. To measure the esterase activity in the cytosol of the fusosomes, samples were stained with Calcein AM (BD Pharmigen, Cat #564061), a fluorescein derivative and nonfluorescent vital dye that passively crosses the cell membrane of viable cells and is converted by cytosolic esterases into green fluorescent calcein, which is retained by cells with intact membranes and inactive multidrug resistance protein.

[1252] Briefly, the fusosome sample was measured for total protein content by bicinchoninic acid assay (BCA, ThermoFisher, Cat #23225) according to manufacturer's instructions. Next 20 ug of fusosome total protein was pelleted by centrifugation at 3000 g for 5 minutes in a table-top centrifuge, followed by resuspension in 400 uL of DMEM supplemented with 0.5% fetal bovine serum. The membrane-permeable dye, calcein-AM was prepared as a stock solution of 10 mM in dimethylsulfoxide and as a working solution of 1 mM in PBS buffer, pH 7.4. VSV-G fusosomes were stained with 1 μM solution of calcein-AM diluted in DMEM media. Samples were incubated at 37° C. in the dark for 30 minutes and then pelleted by centrifugation. After washing twice with PBS buffer, fusosomes were resuspended in PBS and analyzed by flow cytometry.

[1253] The samples were measured for calcein fluorescence retention using an Invitrogen Attune N×T acoustic focusing cytometer. Calcein AM was excited with a 488 nm laser and emission captured at 513±26 nm. Forward and side scatter gating was initially used to capture fusosome-sized events and discard small debris. Events positive for calcein were determined by gating at the minimum level for which the calcein negative control sample showed <0.5% of events positive for calcein staining. The gated cells positive for calcein fluorescence were then assessed for the mean fluorescence intensity (F.I.) of calcein in order to calculate a value for esterase activity in the cytosol of fusosomes.

[1254] With this assay the fusosome derived from a C2C12 cell showed an esterase activity (mean calcein F.I.) of 631.0+/−1.4 (FIG. 8).

### Example 74: Measuring Acetylcholinesterase Activity in Fusosomes

[1255] Fusosomes from HEK-293T cells expressing the placental cell-cell fusion protein syncytin-1 (Syn1) on the cell surface and expressing Cre recombinase protein were generated as described herein. Acetylcholinesterase activity was measured using the FluoroCet Quantitation Kit (System Biosciences, Cat #FCET96A-1) following the manufacturer's recommendations.

[1256] Briefly, fusosomes were pelleted via ultracentrifugation at 120,000 g for 90 minutes and resuspended carefully in phosphate-buffered saline (PBS). Next fusosomes were quantified for total protein content by bicinchoninic acid assay (BCA, ThermoFisher, Cat #23225) according to manufacturer's instructions. After BCA quantification of protein concentration, 1000 ng of total fusosome protein was diluted with PBS to a volume of 60 uL, followed by addition of 60 uL of Lysis Buffer to lyse the particles. After a 30 minute incubation on ice the samples were ready to run in the FluoroCet assay.

[1257] In duplicate wells of a 96-well plate, 50 uL of lysed fusosome sample was mixed with 50 uL of Working stock of Buffer A and 50 uL of Working stock of Buffer B. In parallel, a standard curve was prepared by pipetting 2 uL of the provided standard in 126 uL of 1× Reaction buffer. This standard solution was then serial diluted 5× to make a six-point standard curve consisting of 2.0E+08, 1.0E+08, 5.0E+07, 2.5E+07, 1.25E+07, and 6.25E+06 exosome equivalents of acetylcholinesterase activity. 50 uL of each standard was then mixed with 50 uL of Working stock of Buffer A and 50 uL of Working stock of Buffer B in duplicate wells of the 96-well plate. 50 uL of 1× Reaction buffer was used as a blank. The plate was mixed by tapping the sides followed by incubation in the dark for 20 minutes at room temperature. The plate was then measured immediately using a fluorescence plate reader set at Excitation: 530-570 nm and Emission: 590-600 nm. The plate was shaken for 30 sec before reading.

[1258] The relative fluorescence units (RFU) were then plotted against the known exosome equivalents of acetylcholinesterase activity after subtracting the RFU values from the blank wells. A linear regression line was then calculated and the equation used to determine the acetylcholinesterase activity (in exosome equivalents) for the fusosome samples from the measured RFU values. The measured acetylcholinesterase activity for Synl fusosomes are shown in Table 11:

TABLE 11
Acetylcholinesterase activity in fusosomes and control particles

| Sample | Acetylcholinesterase activity (exosome equivalents) |
|---|---|
| Syn1 fusosomes | 6.83E+05 +/− 2.21E+05 |

### Example 75: Measuring Metabolic Activity Level

[1259] Fusosomes from HEK-293T cells expressing the envelope glycoprotein G from vesicular stomatitis virus (VSV-G) on the cell surface and expressing Cre recombinase protein were generated as described herein. To determine the metabolic activity level of the fusosome preparation, citrate synthase activity was assessed using a commercially available kit from Sigma (Cat #CS0720) which provides all of the necessary reagents. Citrate synthase is an enzyme within the tricarboxylic acid (TCA) cycle that catalyzes the reaction between oxaloacetate (OAA) and acetyl-CoA to generate citrate. Upon hydrolysis of acetyl-CoA, there is a release of CoA with a thiol group (CoA-SH). The thiol group reacts with a chemical reagent, 5,5-Dithiobis-(2-nitrobenzoic acid) (DTNB), to form 5-thio-2-nitrobenzoic acid (TNB), which has a yellow product that can be measured spectrophotometrically at 412 nm.

[1260] The assay was performed as per the manufacturer's recommendations. Briefly, fusosome sample was measured for total protein content by bicinchoninic acid assay (BCA, ThermoFisher, Cat #23225) according to manufacturer's instructions. Next 400 ug of fusosome total protein was pelleted by centrifugation at 3000 g for 5 minutes in a table-top centrifuge. The fusosomes were washed once by pelleting again and resuspending in ice-cold PBS. Fusosomes were pelleted again and supernatant was removed. The pellet was lysed in 100 uL of CellLytic M buffer with 1× protease inhibitors. After mixing by pipetting, the lysed sample was incubated for 15 minutes at room temperature to complete lysis. The sample was then centrifuged at 12,000 g for 10 minutes and the supernatant was transferred to a new microcentrifuge tube and stored at −80° C. until the subsequent assay was performed.

[1261] To initiate the citrate synthase activity assay, all assay solutions were warmed to room temperature prior to using. The lysed fusosome sample was mixed with assay solutions according to Table 12 below:

TABLE 12
Reaction Scheme for Citrate Synthase
Activity Measurement in 96 Well Plate

| | | 30 mM | 10 mM | 10 mM |
|---|---|---|---|---|
| | Assay | Acetyl CoA | DTNB | OAA solution |
| Sample | buffer | solution | solution | (added last) |
| 4 uL | 182 uL | 2 uL | 2 uL | 10 uL |

[1262] The volumes in Table 12 represent volumes for a single well of a 96-well plate. Samples were measured in duplicates. All components of the reaction were mixed and pipetted into a single well of a 96-well plate. The absorbance at 412 nm was then analyzed on a microplate reader for 1.5 minutes to measure the baseline reaction. Next, 10 uL of the 10 mM OAA solution was added to each well to initiate the reaction. The plate was shaken for 10 seconds in the microplate reader before reading the absorbance at 412 nm for 1.5 minutes with a measurement every 10 seconds.

[1263] To calculate the citrate synthase activity, the absorbance at 412 nm was plotted against time for each reaction. The change in absorbance per minute was calculated for the linear range of the plot for before (endogenous activity) and after (total activity) OAA addition. The net citrate synthase activity was then calculated by subtracting the endogenous activity from the total activity for the sample. This value was then used to calculate the citrate synthase activity based on the equation and constant values provided by the manufacturer. The measured citrate synthase activity for the VSV-G fusosomes was 1.57E−02+/−1.86E−03 umol/ug fusosome/min.

### Example 76: Measuring Respiration Levels

[1264] Fusosomes from HEK-293T cells expressing the envelope glycoprotein G from vesicular stomatitis virus (VSV-G) on the cell surface were generated according by the standard procedure of ultracentrifugation through a Ficoll gradient to obtain small particle fusosomes as described herein. Respiration level in the fusosome preparation were determined by measuring mitochondrial oxygen consumption rates by a Seahorse extracellular flux analyzer (Agilent).

[1265] Briefly, the fusosome sample was measured for total protein content by bicinchoninic acid assay (BCA, ThermoFisher, Cat #23225) according to manufacturer's instructions. Next 20 μg of fusosome total protein was pelleted by centrifugation at 3000 g for 5 minutes in a table-top centrifuge, followed by resuspension (in quadruplicates) in 150 μL of XF Assay media (Agilent Cat #103575-100) supplemented with 25 mM glucose and 2 mM glutamine (pH 7.4). The resuspended samples were then added to one well of a 96-well Seahorse plate (Agilent).

[1266] Oxygen consumption assays were initiated by incubating the 96-well Seahorse plate with samples at 37° C. for 60 minutes to allow temperature and pH to reach equilibrium. The microplate was then assayed in the XF96 Extracellular Flux Analyzer (Agilent) to measure extracellular flux changes of oxygen and pH in the media immediately surrounding the fusosomes. After obtaining steady state oxygen consumption and extracellular acidification rates, oligomycin (5 μM), which inhibits ATP synthase, and proton ionophore FCCP (carbonyl cyanide 4-(trifluoromethoxy) phenylhydrazone; 2 μM), which uncouples mitochondria, were injected sequentially through reagent delivery chambers for each well in the microplate to obtain values for maximal oxygen consumption rates. Finally, 5 μM antimycin A (inhibitor of mitochondrial complex III) was injected to confirm that respiration changes were due mainly to mitochondrial respiration. The rates of antimycin A respiration were subtracted from the other three respiration rates in order to determine the basal, uncoupled (oligomycin-resistant), and maximal (FCCP-induced) mitochondrial respiration rates.

[1267] Using this assay it was determined that donor VSV-G fusosomes showed basal, uncoupled, and maximal oxygen consumption (respiration) rates according to Table 13 below.

TABLE 13
Respiration rates of VSV-G fusosomes

| | Mitochondrial oxygen consumption |
|---|---|
| | (respiration) rate |
| | (pmol/min/20 μg fusosome) |
| Respiration state | AVG ± SEM |
| Basal | 11.3 ± 3.0 |
| Uncoupled | 10.1 ± 2.3 |
| Maximal | 20.0 ± 1.9 |

### Example 77: Measuring Phosphatidylserine Levels of Fusosomes

[1268] Fusosomes from HEK-293T cells expressing the envelope glycoprotein G from vesicular stomatitis virus (VSV-G) on the cell surface and expressing Cre recombinase protein were generated according by the standard procedure of ultracentrifugation through a Ficoll gradient to obtain small particle fusosomes as described herein. To measure the phosphatidylserine levels of the fusosomes, annexin V staining was performed using a commercially available annexin V conjugated with Alexa Fluor 647 dye (Cat #A23204) according to the manufacturer's instructions. Annexin V is a cellular protein that can bind phosphatidylserine when it is exposed on the outer leaflet of the plasma membrane; thus, the readout of annexin V binding to a sample can provide an assessment of phosphatidylserine levels in the sample.

[1269] Briefly, the fusosome sample was measured for total protein content by bicinchoninic acid assay (BCA, ThermoFisher, Cat #23225) according to manufacturer's instructions. Next 40 μg of fusosome total protein was pelleted by centrifugation (in sample triplicates) at 3000 g for 5 minutes in a table-top centrifuge, followed by resuspension in 400 uL of DMEM supplemented with 2% fetal bovine serum. One sample was treated with 40 μM antimycin A. The samples were then incubated for 1 hour at 37 C. After the incubation samples were then pelleted by centrifugation again and resuspended in 100 μL annexin-binding buffer (ABB; 10 mM HEPES, 140 mM NaCl, 2.5 mM CaCl₂, pH 7.4). Next 5 μL of annexin V conjugated with Alexa Fluor 647 was added to each sample (except for the negative control with no annexin V staining). The samples were incubated for 15 minutes at room temperature followed by addition of 400 μL ABB.

[1270] The samples were then measured for annexin V staining by flow cytometry analysis using an Invitrogen Attune N×T acoustic focusing cytometer. Annexin V conjugated with Alexa Fluor 647 was excited with a 638 nm laser and emission captured at 670±14 nm. Forward and side scatter gating was initially used to capture fusosome-sized events and discard small debris. Events positive for Alexa Fluor 647 (annexin V) staining were determined by gating at the minimum level for which the unstained, annexin V-negative control sample showed <0.5% of events positive for Alexa Fluor 647 staining. The gated events positive for Alexa Fluor 647 staining were then assessed for the percentage of annexin V-positive events of the total parent population (fusosome-sized events in the forward/side scatter gate) and this value was used as the quantification of phosphatidylserine levels in the fusosome sample.

[1271] With this assay the fusosome derived from a HEK-293T cell expressing the VSV-G and Cre showed a % annexin V-positive fusosomes of 63.3±2.3% without antimycin A treatment and percentage of annexin V-positive fusosomes of 67.6±5.7% with antimycin A treatment.

### Example 78: Measuring Average Mitochondrial Membrane Potential

[1272] Fusosomes from HEK-293T cells expressing the envelope glycoprotein G from vesicular stomatitis virus (VSV-G) on the cell surface and expressing Cre recombinase protein were generated according by the standard procedure of ultracentrifugation through a Ficoll gradient to obtain small particle fusosomes as described herein. To measure the average mitochondrial membrane potential levels of the fusosomes, a commercially available dye that is mitochondrial membrane potential sensitive, tetramethyl rhodamine, ethyl ester, perchlorate (TMRE; Abcam, Cat #T669) was used for assessing mitochondrial membrane potential. To normalize TMRE fluorescence intensity (FI) to the amount of mitochondria in the sample, MitoTracker Green FM dye (MTG; ThermoFisher, Cat #M7514) was used to co-stain samples in order to normalize TMRE FI to the MTG FI and thus to the amount of mitochondria in the sample. In addition, carbonyl cyanide-p-trifluoromethoxyphenylhydrazone (FCCP; Sigma Cat #C2920) was used to treat a parallel set of samples in order to fully depolarize the mitochondrial membrane potential and thus allow quantification of mitochondrial membrane potential in millivolts based on the decrease in TMRE FI.

[1273] Briefly, the fusosome sample was measured for total protein content by bicinchoninic acid assay (BCA, ThermoFisher, Cat #23225) according to manufacturer's instructions. Next 40 μg of fusosome total protein was pelleted by centrifugation (in sample quadruplicates for untreated and FCCP-treated duplicates) at 3000 g for 5 minutes in a table-top centrifuge, followed by resuspension in 100 uL of DMEM supplemented with 2% fetal bovine serum and containing TMRE and MTG dyes at a final concentration of 30 nM and 200 nM, respectively. A parallel set of fusosome samples was left unstained as a negative control. The samples were incubated at for 45 minutes at 37° C. After incubation, samples were pelleted by centrifugation and resuspended in 400 μL of phenol red-free DMEM media containing 30 nm TMRE. One set of duplicates was treated with 20 μM FCCP for 5 minutes before assessment by flow cytometry.

[1274] The samples were then measured for annexin V staining by flow cytometry analysis using an Invitrogen Attune N×T acoustic focusing cytometer. MTG was excited with a 488 nm laser and emission captured at 530±30 nm. TMRE was excited with a 561 nm laser and emission captured at 585±16 nm. Forward and side scatter gating was initially used to capture fusosome-sized events and discard small debris. Events positive for MTG and TMRE staining were determined by gating at the minimum level for which the unstained control sample showed <0.5% of events positive for MTG or TMRE staining. The gated events positive for MTG and TMRE staining were then assessed for the mean FI of MTG and TMRE.

[1275] Membrane potential values (in millivolts, mV) are calculated based on the intensity of TMRE after normalizing TMRE FI values to MTG FI values. This TMRE/MTG ratio value allows for normalization TMRE intensity to the amount of mitochondria in the sample. The TMRE/MTG ratio value for both the untreated and FCCP-treated samples are calculated and used to determine the membrane potential in millivolts using a modified Nernst equation (see below) that can determine mitochondrial membrane potential based on TMRE fluorescence (as TMRE accumulates in mitochondria in a Nernstian fashion). Fusosome membrane potential is calculated with the following formula: (mV)=−61.5*log(FI(untreated)/FI(FCCP-treated)). Using this equation, the calculated mitochondrial membrane potential of the VSV-G fusosome sample was −29.6±1.5 millivolts.

### Example 79: Measuring Targeting Potential in a Subject (BiVs-Cre Gesicles)

[1276] This example assesses the ability of a fusosome to target a specific body site. Fusosomes were derived using methods as described herein and were loaded with cre-recombinase protein.

[1277] Two doses of fusosomes (1× and 3×) were delivered into Loxp Luciferase (Jackson Laboratory, 005125) mice were injected intravenously (I.V.) via tail vein. Mice were placed underneath a heat lamp (utilizing a 250 W (infrared) heat lamp bulb) for ˜5 minutes (or until mice begin to groom their whiskers excessively) to dilate the tail vein. Mice were placed on a restrainer and tail was wiped down with 70% ethanol to better visualize the vein.

[1278] Using a tuberculin syringe, 200 μL of fusosome 1× solution (8.5e8±1.4e8 particles/μL, mean(SEM)) or 3× solution (2.55e9±1.4e8 particles/μL, mean(SEM)) was injected IV. Upon completion of injection, the syringe was removed, and pressure was applied to the injection site.

[1279] After fusion, CRE protein translocated to the nucleus to carry out recombination, which resulted in the constitutive expression of luciferase. Three days post-treatment, the ventral region of subjects was prepared by depilating the area (Nair Hair Remover cream for 45 seconds, followed by cleaning the area with 70% ethanol). Subjects were then treated with D-luciferin (Perkin Elmer, 150 mg/kg) via intraperitoneal administration. This enabled the detection of luciferase expression via in vivo bioluminescent imaging. The animal was placed into an in vivo bioluminescent imaging chamber (Perkin Elmer) which houses a cone anesthetizer (isoflurane) to prevent animal motion. Photon collection was carried out between 3-15 minutes post-injection to observe the maximum bioluminescent signal due to D-luciferin pharmacokinetic clearance. Maximum radiance was recorded in photons/sec/cm2/radians. Total flux, which integrates the radiance over the area, was quantified using a region of interest (ROI) tool within the Living Image Software (Perkin Elmer) and reported in photons/sec.

[1280] Evidence of protein (Cre recombinase) delivery by fusosomes was detected by bioluminescent imaging in the recipient tissue of the animal, as shown in FIGS. 9A-9B. Signal was seen primarily in the spleen and liver, with the 3× group showing the highest signal.

[1281] Following whole body imaging, mice were cervically dislocated and liver, heart, lungs, kidney, small intestines, pancreas, and spleen were collected and imaged within 5 minutes of euthanasia. Evidence of protein (Cre recombinase) delivery to the liver and spleen by fusosomes was detected by bioluminescent imaging in the extracted recipient tissue of the animals. This can be seen in FIGS. 10A-10B. Signal was highest in spleen and the lowest in heart, with the 3× group showing the highest significant signal (p=0.0004 as compared to heart).

### Example 80: Delivery of Fusosomes via a Pathway that is Independent of Lysosome Acidification

[1282] Often, entry of complex biological cargo into target cells is accomplished by endocytosis. Endocytosis requires the cargo to enter an endosome, which matures into an acidified lysosome. Disadvantageously, cargo that enters a cell through endocytosis may become trapped in an endosome or lysosome and be unable to reach the cytoplasm. The cargo may also be damaged by acidic conditions in the lysosome. Some viruses are capable of non-endocytic entry into target cells; however this process is incompletely understood. This example demonstrates that a viral fusogen can be isolated from the rest of the virus and confer non-endocytic entry on a fusosome that lacks other viral proteins.

[1283] Fusosomes from HEK-293T cells expressing the Nipah virus receptor-binding G protein and fusion F protein (NivG+F) on the cell surface and expressing Cre recombinase protein were generated according by the standard procedure of ultracentrifugation through a Ficoll gradient to obtain small particle fusosomes, as described herein. To demonstrate delivery of the fusosome to a recipient cell via a non-endocytic pathway, the NivG+F fusosomes were used to treat recipient HEK-293T cells engineered to express a “Loxp-GFP-stop-Loxp-RFP” cassette under CMV promoter. NivF protein is a pH-independent envelope glycoprotein that has been shown to not require environmental acidification for activation and subsequent fusion activity (Tamin, 2002).

[1284] The recipient cells were plated 30,000 cells/well into a black, clear-bottom 96-well plate. Four to six hours after plating the recipient cells, the NivG+F fusosomes expressing Cre recombinase protein were applied to the target or non-target recipient cells in DMEM media. The fusosome sample was first measured for total protein content by bicinchoninic acid assay (BCA, ThermoFisher, Cat #23225) according to manufacturer's instructions. Recipient cells were treated with 10 μg of fusosomes and incubated for 24 hrs at 37° C. and 5% CO2. To demonstrate that Cre delivery via NivG+F fusosomes was through a non-endocytic pathway, a parallel wells of recipient cells receiving NivG+F fusosome treatment were co-treated with an inhibitor of endosome/lysosome acidification, bafilomycin A1 (Baf; 100 nM; Sigma, Cat #B1793).

[1285] Cell plates were imaged using an automated microscope (www.biotek.com/products/imaging-microscopy-automated-cell-imagers/lionheart-fx-automated-live-cell-imager/). The total cell population in a given well was determined by staining the cells with Hoechst 33342 in DMEM media for 10 minutes. Hoechst 33342 stains cell nuclei by intercalating into DNA and was therefore used to identify individual cells. Hoechst staining was imaged using the 405 nm LED and DAPI filter cube. GFP was imaged using the 465 nm LED and GFP filter cube, while RFP was imaged using the 523 nm LED and RFP filter cube. Images of target and non-target cell wells were acquired by first establishing the LED intensity and integration times on a positive control well containing recipient cells treated with adenovirus coding for Cre recombinase instead of fusosomes.

[1286] Acquisition settings were set so that Hoescht, RFP, and GFP intensities were at the maximum pixel intensity values but not saturated. The wells of interest were then imaged using the established settings. Focus was set on each well by autofocusing on the Hoescht channel and then using the established focal plane for the GFP and RFP channels. Analysis of GFP and RFP-positive cells was performed with Gen5 software provided with automated fluorescent microscope (https://www.biotek.com/products/software-robotics-software/gen5-microplate-reader-and-imager-software/).

[1287] The images were pre-processed using a rolling ball background subtraction algorithm with a 60 μm width. Cells with GFP intensity significantly above background intensities were thresholded and areas too small or large to be GFP-positive cells were excluded. The same analysis steps were applied to the RFP channel. The number of RFP-positive cells (recipient cells receiving Cre) was then divided by the sum of the GFP-positive cells (recipient cells that did not show delivery) and RFP-positive cells to quantify the percentage RFP conversion, which indicates the amount of fusosome fusion with the recipient cells.

[1288] With this assay, the fusosome derived from a HEK-293T cell expressing NivG+F on its surface and containing Cre recombinase protein showed significant delivery via a lysosome-independent pathway, which is consistent with entry via a non-endocytic pathway, as evidenced by a significant delivery of Cre cargo by NivG+F fusosomes even when recipient cells were co-treated with Baf to inhibit endocytosis-mediated uptake (FIG. 11). In this case, the inhibition of cargo delivery by Baf co-treatment was 23.4%.

### Example 81: Measuring Ability to Polymerize Actin for Mobility

[1289] Fusosomes were generated by the standard procedure of harvesting and preparing fusosomes produced from HEK-293T cells expressing the envelope glycoprotein G from vesicular stomatitis virus (VSV-G) on the cell surface, as described herein. Control particles (non-fusogenic fusosomes) were produced from HEK-293T cells reverse transiently transfected with pcDNA3.1 empty vector. Fusosomes and parental cells were then assayed for their ability to polymerize actin (over time) using a rhodamine phalloidin-flow cytometry assay and Tubulin ELISA. Briefly, approximately 1×10⁶ fusosomes corresponding to 60 μL of a standard VSV-G fusosome preparation and 1×10⁵ parent cells used to generate the fusosomes were plated in 1 mL of complete media in a 96 well low-attachment multi-well plate in complete and incubated at 37° C. and 5% CO₂. Samples were taken periodically, at 3 hr, 5 hr and 24 hr post plating. Samples were centrifuged at 21,000×g for 10 mins, re-suspended in 200 uL 4% (v/v) PFA in phosphate buffered saline for 10 mins, washed with 1 mL of phosphate buffered saline, centrifuged at 21,000×g for 10 mins, washed again and stored at 4° C. until further use.

[1290] For rhoamine-phalloidin staining, samples were centrifuged at 21,000×g for 10 mins, and incubated in 100 uL of 0.1% (v/v) Triton X-100 in phosphate buffered saline for 20 mins. Following the 20-min incubation, an additional 100 uL of 0.1% (v/v) Triton X-100 in phosphate buffered saline containing 165 μM rhodamine-phalloidin was added to the sample and pipette mixed, negative control received and additional 100 uL of 100 uL of 0.1% (v/v) Triton X-100 in phosphate buffered saline only. Samples were incubated for 45 mins before being washed with 1 mL of phosphate buffered saline, centrifuged at 21,000×g for 10 mins, washed again and re-suspended in 300 uL of phosphate buffered saline and analyzed by flow cytometry (Attune, ThermoFisher) using a 561 nm laser for excitation, and 585+/−16 nm filter emission, as shown in the table below:

[1291] Flow Cytometer Settings

| | Attune Laser/ | Laser | Emission |
|---|---|---|---|
| Dye | Filter | Wavelength | Filter (nm) |
| AF47 | YL1 | 585 | 585/16 |

[1292] Attune N×T software was used for acquisition and FlowJo used analysis. For data acquisition the FSC and SSC channels were set on linear axis to determine a population representative of the cells or fusosomes. This population was then gated and events only inside this gate were used to display events in the 585+/−16 nm emission channel on a logarithmic scale. A minimum of 10,000 events within the cells or fusosomes gate was collected for in each condition. For data analysis, the FSC and SSC channels were set on linear axis to determine a population representative of the cells or fusosomes. This population was then gated and events only inside this gate were used to display events in the 585+/−16 nm emission channel on a logarithmic scale. The negative control 585+/−16 nm emission was used to determine where to place the gate on the histogram such that it was less the gate include less than 1% positive. Using analysis criteria listed above parent cells demonstrated 19.9%, 24.8% and 82.5% rhodamine-phalloidin positive events, at the 3 hr, 5 hr and 24 hr time-points, respectively. The fusosomes were 44.6%, 41.9% and 34.9% rhodamine-phalloidin at the 3 hr, 5 hr and 24 hr time-points, respectively (FIG. 2). This example demonstrates that fusosomes do not increase in amount of actin over time, whereas the parent cells do.

### Example 82: Measuring GAPDH in Fusosomes

[1293] This example describes quantification of the level of glyceraldehyde 3-phosphate dehydrogenase (GAPDH) in the fusosomes, and the relative level of GAPDH in the fusosomes compared to the parental cells. Fusosomes were prepared as described in Examples 67 and 86.

[1294] GAPDH was measured in the parental cells and the fusosomes using a standard commercially available ELISA for GAPDH (ab176642, Abcam) per the manufacturer's directions. Total protein levels were similarly measured via bicinchoninic acid assay. Measured GAPDH and protein levels are shown in the table below:

| | [Protein] | [GAPDH] | GAPDH:Protein |
|---|---|---|---|
| | (mg/mL) | (ng/mL) | (μg/g) |
| Fusosomes | 0.82 | 37.2 | 45.3 |
| Cells | 0.45 | 50.4 | 112.0 |

[1295] GAPDH: Total protein ratios are also shown in FIG. 12.

### Example 83: Ratio of Lipids to Proteins in Fusosomes

[1296] This Example describes quantification of the ratio of lipid mass to protein mass in fusosomes. It is contemplated that fusosomes can have a ratio of lipid mass to protein mass that is similar to that of nucleated cells. Fusosomes and parental cells were prepared as described herein in Examples 67 and 86.

[1297] The lipid content was calculated using choline-containing phospholipids as a subset of total lipids using a commercially available phospholipid assay kit (MAK122 Sigma St. Louis, Mo.) according to manufacturer's instructions. Total protein content of the fusosomes was measured via bicinchoninic acid assay as described herein. Measured phospholipid levels, protein levels, and the ratio of phospholipids to protein are shown in FIG. 13 and the table below:

| | Phospholipids | Protein | Phospholipids:Protein |
|---|---|---|---|
| | (μM) | (g/L) | (μmol/g) |
| Fusosomes | 115.6 | 0.82 | 141.0 |
| Cells | 47.9 | 0.45 | 106.4 |

### Example 84: Ratio of Proteins to DNA in Fusosomes

[1298] This Example describes quantification of the ratio of protein mass to DNA mass in fusosomes. It is contemplated that fusosomes can have a ratio of protein mass to DNA mass that is much greater than that of cells. Fusosomes were prepared as described in Examples 67 and 86.

[1299] Total protein content of the fusosomes and cells was measured via bicinchoninic acid as described herein. The DNA mass of fusosomes and cells were measured by absorption at 280 nm after extraction of total DNA using a commercially available isolation kit (#69504 Qiagen Hilden, Germany) according to the manufacturer's instructions. The ratio of proteins to total nucleic acids was determined by dividing the total protein content by the total DNA content to yield a ratio within a given range for a typical fusosome preparation. Measured protein levels, DNA levels, and the ratio of protein to DNA are shown in FIG. 14 and the table below:

| | [Protein] | [DNA] | Protein:DNA |
|---|---|---|---|
| | (mg/mL) | (ng/μL) | (g/g) |
| Fusosomes | 0.82 | 29.5 | 27.8 |
| Cells | 0.45 | 15.9 | 28.3 |

### Example 85: Ratio of Lipids to DNA in Fusosomes

[1300] This Example describes quantification of the ratio of lipids to DNA in fusosomes compared to parental cells. In an embodiment, fusosomes will have a greater ratio of lipids to DNA compared to parental cells. Fusosomes were prepared as described previously in Examples 67 and 86.

[1301] This ratio is defined as the lipid content outlined in Example 40, and nucleic acid content is determined as described in Example 41. Measured lipid levels, DNA levels, and the ratio of lipid to DNA are shown in FIG. 15 and the table below:

| | [Lipids] | [DNA] | Lipids:DNA |
|---|---|---|---|
| | (μM) | (ng/μL) | (μmol/mg) |
| Fusosomes | 115.6 | 29.5 | 3.92 |
| Cells | 47.9 | 15.9 | 3.01 |

### Example 86: Measuring Lipid Composition in Fusosomes

[1302] This Example describes quantification of the lipid composition of fusosomes. It is contemplated that the lipid composition of fusosomes can be similar to the cells from which they are derived. Lipid composition affects important biophysical parameters of fusosomes and cells, such as size, electrostatic interactions, and colloidal behavior.

[1303] The lipid measurements were based on mass spectrometry. Fusosomes were prepared as described herein by transient transfection of VSV-G and GFP in 10 cm dishes, followed by filtration and ultracentrifugation of the conditioned media 48 h after transfection to obtain fusosomes. Transfected cells were harvested in parallel to the conditioned media and submitted for analysis. Exosomes were also harvested from cells that were not transfected with VSV-G or GFP.

[1304] Mass spectrometry-based lipid analysis was performed by Lipotype GmbH (Dresden, Germany) as described (Sampaio et al. 2011). Lipids were extracted using a two-step chloroform/methanol procedure (Ej sing et al. 2009). Samples were spiked with internal lipid standard mixture containing: cardiolipin 16:1/15:0/15:0/15:0 (CL), ceramide 18:1; 2/17:0 (Cer), diacylglycerol 17:0/17:0 (DAG), hexosylceramide 18:1; 2/12:0 (HexCer), lyso-phosphatidate 17:0 (LPA), lyso-phosphatidylcholine 12:0 (LPC), lyso-phosphatidylethanolamine 17:1 (LPE), lyso-phosphatidylglycerol 17:1 (LPG), lyso-phosphatidylinositol 17:1 (LPI), lyso-phosphatidylserine 17:1 (LPS), phosphatidate 17:0/17:0 (PA), phosphatidylcholine 17:0/17:0 (PC), phosphatidylethanolamine 17:0/17:0 (PE), phosphatidylglycerol 17:0/17:0 (PG), phosphatidylinositol 16:0/16:0 (PI), phosphatidylserine 17:0/17:0 (PS), cholesterol ester 20:0 (CE), sphingomyelin 18:1; 2/12:0; 0 (SM), triacylglycerol 17:0/17:0/17:0 (TAG) and cholesterol D6 (Chol).

[1305] After extraction, the organic phase was transferred to an infusion plate and dried in a speed vacuum concentrator. 1st step dry extract was re-suspended in 7.5 mM ammonium acetate in chloroform/methanol/propanol (1:2:4, V:V:V) and 2nd step dry extract in 33% ethanol solution of methylamine in chloroform/methanol (0.003:5:1; V:V:V). All liquid handling steps were performed using Hamilton Robotics STARlet robotic platform with the Anti Droplet Control feature for organic solvents pipetting.

[1306] Samples were analyzed by direct infusion on a QExactive mass spectrometer (Thermo Scientific) equipped with a TriVersa NanoMate ion source (Advion Biosciences). Samples were analyzed in both positive and negative ion modes with a resolution of R_{m/z}=200=280000 for MS and R_{m/z}=200=17500 for MSMS experiments, in a single acquisition. MSMS was triggered by an inclusion list encompassing corresponding MS mass ranges scanned in 1 Da increments (Surma et al. 2015). Both MS and MSMS data were combined to monitor CE, DAG and TAG ions as ammonium adducts; PC, PC O-, as acetate adducts; and CL, PA, PE, PE O-, PG, PI and PS as deprotonated anions. MS only was used to monitor LPA, LPE, LPE O-, LPI and LPS as deprotonated anions; Cer, HexCer, SM, LPC and LPC O- as acetate adducts and cholesterol as ammonium adduct of an acetylated derivative (Liebisch et al. 2006).

[1307] Data were analyzed with in-house developed lipid identification software based on LipidXplorer (Herzog et al. 2011; Herzog et al. 2012). Data post-processing and normalization were performed using an in-house developed data management system. Only lipid identifications with a signal-to-noise ratio >5, and a signal intensity 5-fold higher than in corresponding blank samples were considered for further data analysis.

[1308] Fusosome lipid composition was compared to lipid compositions of parental cells, with undetected lipid species assigned a value of zero. The lipid species identified in fusosomes and parental cells are shown in the table below:

| | | Shared Lipid | Shared Lipid | |
|---|---|---|---|---|
| | | Species | Species with | |
| | | (identified in | 25% of | Fraction of |
| | Total Lipid | both parental | parental | Shared Lipid |
| | Species | cells and | expression | Species to |
| | Identified | fusomes) | in fusosomes | Total Lipids |
| Fusosomes | 679 | 569 | 548 | 0.700 |
| Parental | 783 | | | |
| Cells | | | | |

[1309] It is contemplated that fusosomes and parental cells can have a similar lipid composition if ≥70% of the lipid species identified in any replicate sample of the parental cells are present in any replicate sample of the fusosomes, and of those identified lipids, the average level in the fusosome can be >25% of the corresponding average lipid species level in the parental cell.

### Example 87: Measuring Proteomic Composition in Fusosomes

[1310] This Example describes quantification of the protein composition of fusosomes. It is contemplated that the protein composition of fusosomes can be similar to the parental cells from which they are derived.

[1311] Fusosomes and parental cells were prepared as described herein by the method of Examples 67 and 86.

[1312] Each sample was resuspended in lysis buffer (6 M urea, 2 M thiourea, 4% CHAPS, 50 mM Tris pH 8.0), sonicated on an ice bath and ran through a small gauge syringe. Proteins were reduced with 10 mM DTT for 15 minutes at 65° C. and alkylated with 15 mM iodoacetamide (IAA) for 30 minutes in the dark at room temperature. Excess IAA was quenched with an additional 10 mM DTT. Proteins were then precipitated with the addition of 8 volumes of ice cold acetone+1 volume of ice cold methanol and placed at −80° C. overnight. The precipitated proteins were pelleted by centrifugation. Remaining lysis buffer was washed with 200 μl of ice cold methanol 3 times. Proteins were resuspended in 0.75 M urea+50 mM Tris pH 8.0+1 μg Trypsin/LysC and pre-digested for 4 hours at 37° C. with agitation. An additional 1 μg of trypsin/LysC was added to the proteins and the digestion was continued overnight. Peptides were purified by reversed phase SPE and analyzed by LC-MS.

[1313] A replicate sample for each condition was lysed and combined in one tube. This pool was then either subjected to the same preparation protocol as the samples and analyzed by LC-MS in information dependent acquisition or separated on a gel as described below.

[1314] A total of 100 μg of pooled proteins was placed in 2× Laemmli loading buffer and separated on a 12.5% SDS PAGE. Proteins were briefly stained with Coomassie blue and the protein lanes were separated into 12 fractions. Each fraction was then dehydrated with 50% acetonitrile and rehydrated with 10 mM DTT for the reduction. Gel pieces were placed at 65° C. for 15 minutes and alkylated for 30 minutes at room temperature with 15 mM IAA in the dark. Gels were further dehydrated with 50% acetonitrile and rehydrated in 50 mM Tris pH 8 with 1 μg of trypsin/LysC overnight at 37° C. Peptides were extracted from the gel by dehydration and sonication. Peptides were purified by reversed phase SPE and analyzed by LC-MS/MS (1×IDA per fraction).

[1315] Acquisition was performed with an ABSciex TripleTOF 5600 (ABSciex, Foster City, Calif., USA) equipped with an electrospray interface with a 25 μm iD capillary and coupled to an Eksigent μUHPLC (Eksigent, Redwood City, Calif., USA). Analyst TF 1.7 software was used to control the instrument and for data processing and acquisition. Acquisition was performed in Information Dependent Acquisition (IDA) mode for the 12 fractions from the gel or the unfractionated pool. The samples were analyzed in SWATH acquisition mode. For the IDA mode, the source voltage was set to 5.2 kV and maintained at 225° C., curtain gas was set at 27 psi, gas one at 12 psi and gas two at 10 psi. For the SWATH mode, the source voltage was set to 5.5 kV and maintained at 225° C., curtain gas was set at 25 psi, gas one at 16 psi and gas two at 15 psi. Separation was performed on a reversed phase HALO C18-ES column 0.3 mm i.d., 2.7 μm particles, 150 mm long (Advance Materials Technology, Wilmington, Del.) which was maintained at 60° C. Samples were injected by loop overfilling into a 5 μL loop. For the 60 minutes LC gradient, the mobile phase consisted of the following solvent A (0.2% v/v formic acid and 3% DMSO v/v in water) and solvent B (0.2% v/v formic acid and 3% DMSO in EtOH) at a flow rate of 3 μL/min.

[1316] To generate the ion library for the analysis of the samples, the ProteinPilot software was run on the wiff files that were generated by the IDA runs. This database was used in the Peakview software (ABSciex) to quantify the proteins in each of the samples, using 3 transition/peptide and 15 peptide/protein. To maximize the number of quantified proteins, the samples were quantified on a publicly available human SWATH database (Atlas) with the same parameters. A peptide was considered as adequately measured if the score computed by Peakview was superior to 1.5 and had an FDR <1%. The quantification from each of the database was combined into one final quantification using the protein name from both databases. A correction factor was computed for every sample by taking into account the total signal of every protein in that sample when compared to the average of the total signal for every sample.

[1317] The fusosome proteomic composition was compared to the parental cell proteomic composition. A similar proteomic composition between fusosomes and parental cells was observed when >33% of the identified proteins were present in the fusosome, and of those identified proteins, the level was >25% of the corresponding protein level in the parental cell, as shown in the table below.

| | | Shared proteins | Shared proteins | |
|---|---|---|---|---|
| | | (identified in | with 25% of | Fraction of |
| | Total | both parental | parental | shared |
| | Proteins | cells and | expression | proteins to |
| | Identified | fusomes) | in fusosomes | total proteins |
| Fusosomes | 1926 | 1487 | 957 | 0.333 |
| Cells | 2870 | | | |

### Example 88: Quantifying an Endogenous or Synthetic Protein Level per Fusosome

[1318] This example describes quantification of an endogenous or synthetic protein cargo in fusosomes. Fusosomes can, in some instances, comprise an endogenous or synthetic protein cargo. The fusosome or parental cell described in this Example was engineered to alter the expression of an endogenous protein or express a synthetic cargo that mediates a therapeutic or novel cellular function.

[1319] Fusosomes and parental cells expressing GFP were prepared as described herein by the method of Examples 67 and 86. Quantification of GFP in fusosomes was accomplished using a commercially available ELISA kit (ab171581 Abcam Cambridge, United Kingdom) according to the manufacturer's instructions. Fusosome quantification was performed by Nanoparticle Tracking Analysis using a NanoSight NS300 (Malvern Instruments, Malvern, Worcestershire, United Kingdom). Results are shown in the table below.

| | Concentration (#/mL) |
|---|---|
| GFP Protein | 4.41 × 10¹³ |
| Fusosomes | 2.66 × 10¹¹ |
| GFP:Fusosome | 165.8 |

[1320] It is contemplated that the fusosomes can have at least 1, 2, 3, 4, 5, 10, 20, 50, 100, or more protein agent molecules per fusosome. In an embodiment, the fusosomes will have 166 protein agent molecules per fusosome.

### Example 89: Measuring Markers of Exosomal Proteins in Fusosomes

[1321] This assay describes quantification of the proportion of proteins that are known to be specific markers of exosomes.

[1322] Fusosomes were prepared as described herein by the method of Examples 67 and 86. Exosomes were prepared as described herein for fusosomes by the method of Examples 67 and 86 with the exception that the parental cells were not transfected with VSV-G or GFP. Protein quantification by mass spectrometry for fusosomes and exosomes was performed as described herein in Example 35.

[1323] The resulting protein quantification data was analyzed to determine protein levels and proportions of the known exosomal marker CD63. Average log intensities per group were calculated by adding 1 to intensity values from mass spectrometry, transforming by log10, and computing the mean across replicates. The results are shown in FIG. 16.

### Example 90: Measuring Calnexin in Fusosomes

[1324] This assay describes quantification of the level of calnexin (CNX) in the fusosomes, and the relative level of CNX in the fusosomes compared to the parental cells.

[1325] Fusosomes and parental cells were prepared as described herein in Examples 67 and 86. Calnexin and total protein was measured using mass spectrometry conducted according to the method of Example 35. The calnexin signal intensity determined for parental cells and fusosomes is shown in FIG. 17.

[1326] In embodiments, using this assay, the average fractional content (calculated as described herein in Example 35) of CNX in the fusosomes will be <2.43×10⁻⁴.

[1327] In an embodiment, the decrease in calnexin per total protein in ng/μg from the parent cell to the preparation will be more than 88%.

### Example 91: Ratio of Lipids to DNA in Fusosomes

[1328] This Example describes quantification of the ratio of lipids to DNA in fusosomes compared to parental cells. In an embodiment, fusosomes will have a greater ratio of lipids to DNA compared to parental cells. Fusosomes were prepared as described previously in Examples 67 and 86.

[1329] This ratio is defined as the lipid content outlined in Example 40, and nucleic acid content is determined as described in Example 41. As shown in FIG. 18 and in the table below, fusosomes were found to exhibit a greater lipid:DNA ratio than parental cells.

| | [Lipids] | [DNA] | Lipids:DNA |
|---|---|---|---|
| | (μM) | (ng/μL) | (μmol/mg) |
| Fusosomes | 115.6 | 29.5 | 3.92 |
| Cells | 47.9 | 15.9 | 3.01 |

### Example 92: Analyzing Surface Markers on Fusosomes

[1330] This assay describes identification of surface markers on the fusosomes.

[1331] Fusosomes were prepared as described herein in Examples 67 and 86. Phosphatidylserine was measured by mass spectrometry as described herein in Examples 67 and 86. The quantity of phosphatidylserine relative to total lipids in fusosomes was determined to be 121% greater than the quantity of phosphatidylserine relative to total lipid in parental cells, as shown in the table below.

| | Phosphatidylserine | Phosphatidylserine |
|---|---|---|
| | (molar %) | Percent change |
| Fusosomes | 14.6 | 121% |
| Parental Cells | 6.6 | |

### Example 93: Analysis of Viral Capsid Proteins in Fusosomes

[1332] In this example, the makeup of the sample preparation was analyzed and the proportion of proteins that are derived from viral capsid sources was assessed.

[1333] Fusosomes were prepared as described herein by the method of Examples 67 and 86. Protein quantification by mass spectrometry for fusosomes was performed as described herein in Example 35. The fractional content of the viral capsid proteins was calculated as described herein in Example 35, averaged over fusosome samples, and expressed as a percent.

[1334] Using this approach, the sample was found to contain 0.05% viral capsid protein, as shown in the table below. The only viral capsid protein detected was Complex of Rabbit Endogenous Lentivirus (RELIK) Capsid with Cyclophilin A (PDB 2XGY|B).

| | Raw MS Intensity | Viral:Total Protein (%) |
|---|---|---|
| Viral Capsid Proteins | 5.10 × 10⁵ | 0.05 |
| Total Proteins | 9.46 × 10⁸ | |

### Example 94: Quantification of Fusogen Protein Ratios in Fusosomes

[1335] This example describes quantification of the ratio of fusogen protein to total protein or other proteins of interest in fusosomes. Other proteins of interest may include, but are not limited to, EGFP, CD63, ARRDC1, GAPDH, Calnexin (CNX), and TSG101. Fusosomes were prepared as described herein by the method of Examples 67 and 86. Protein quantification by mass spectrometry for fusosomes was performed as described herein in Example 35. The quantification of all proteins was calculated as described herein in Example 35, averaged over fusosome samples, and expressed as a fraction.

[1336] As shown in the table below, the fusogen was found to have a ratio to EGFP of 156.9, a ratio to CD63 of 2912.0, a ratio to ARRDC1 of 664.9, a ratio to GAPDH of 69.0, a ratio to CNX of 558.4, and a ratio to TSG101 of 3064.1.

| Proteins | Raw MS Intensity | Fusogen:Protein(s) Ratio |
|---|---|---|
| VSV-G | 1.29 × 10⁸ | N/A |
| Total Proteins | 9.46 × 10⁸ | 0.136 |
| EGFP | 8.22 × 10⁵ | 156.9 |
| CD63 | 4.43 × 10⁴ | 2912.0 |
| ARRDC1 | 1.94 × 10⁵ | 664.9 |
| GAPDH | 1.87 × 10⁶ | 69.0 |
| CNX | 2.31 × 10⁵ | 558.4 |
| TSG101 | 4.21 × 10⁴ | 3064.1 |

### Example 95: Quantification of Endogenous and Synthetic Protein Ratios in Fusosomes

[1337] This example describes the quantification of an endogenous or synthetic protein cargo relative to total protein or other proteins of interest in fusosomes. Other proteins of interest may include, but are not limited to, VSV-G, CD63, ARRDC1, GAPDH, Calnexin (CNX), or TSG101. Fusosomes were prepared as described herein by the method of Examples 67 and 86. Protein quantification by mass spectrometry for fusosomes was performed as described herein in Example 35. The quantification of all proteins was calculated as described herein in Example 35, averaged over fusosome samples, and expressed as a fraction.

[1338] As shown in the table below, the synthetic protein cargo was found to have a ratio to VSV-G of 6.37×10⁻³, a ratio to CD63 of 18.6, a ratio to ARRDC1 of 4.24, a ratio to GAPDH of 0.44, a ratio to CNX of 3.56, and a ratio to TSG101 of 19.52.

| Proteins | Raw MS Intensity | Protein Cargo:Protein(s) Ratio |
|---|---|---|
| EGFP | 8.22 × 10⁵ | N/A |
| Total Proteins | 9.46 × 10⁸ | 8.69 × 10⁻⁴ |
| VSV-G | 1.29 × 10⁸ | 6.37 × 10⁻³ |
| CD63 | 4.43 × 10⁴ | 18.6 |
| ARRDC1 | 1.94 × 10⁵ | 4.24 |
| GAPDH | 1.87 × 10⁶ | 0.44 |
| CNX | 2.31 × 10⁵ | 3.56 |
| TSG101 | 4.21 × 10⁴ | 19.52 |

### Example 96: Enriched Lipid Composition in Fusosomes

[1339] This Example describes quantification of the lipid composition of fusosomes, parental cells, and exosomes. It is contemplated that the lipid composition of fusosomes can be enriched and/or depleted for specific lipids relative to the cells from which they are derived. Lipid composition affects important biophysical parameters of fusosomes and cells, such as size, electrostatic interactions, and colloidal behavior.

[1340] The lipid composition was measured as described in Examples 67 and 86. Fusosomes were prepared as described herein by transient transfection of VSV-G and GFP in 10 cm dishes, followed by filtration and ultracentrifugation of the conditioned media 48 hours after transfection to obtain fusosomes. Transfected cells were harvested in parallel to the conditioned media and submitted for analysis. Exosomes were prepared as described herein for fusosomes with the exception that the parental cells were not transfected with VSV-G or GFP.

[1341] The lipid composition for fusosomes, exosomes, and parental cells is shown in FIGS. 19A-19B. Compared to parental cells, fusosomes were enriched for cholesteryl ester, free cholesterol, ether-linked lyso-phosphatidylethanolamine, lyso-phosphatidylserine, phosphatidate, ether-linked phosphatidylethanolamine, phosphatidylserine, and sphingomyelin. Compared to parental cells, fusosomes are depleted for ceramide, cardiolipin, lyso-phosphatidylcholine, lyso-phosphatidylethanolamine, lyso-phosphatidylglycerol, lyso-phosphatidylinositol, ether-linked phosphatidylcholine, phosphatidylethanolamine, phosphatidylglycerol, phosphatidylinositol, and triacylglycerol. Compared to exosomes, fusosomes were enriched for cholesteryl ester, ceramide, diacylglycerol, lyso-phosphatidate, and phosphatidylethanolamine, triacylglycerol. Compared to exosomes, fusosomes are depleted for free cholesterol, hexosyl ceramide, lyso-phosphatidylcholine, ether-linked lyso-phosphatidylcholine, lyso-phosphatidylethanolamine, ether-linked lyso-phosphatidylethanolamine, and lyso-phosphatidylserine,

### Example 97: Measuring Compartment-Specific Proteomic Content of Fusosomes

[1342] This Example describes quantification of the proportion of proteins that are known to be derived from specific cellular compartments in fusosomes, fusosome parental cells, and exosomes.

[1343] Fusosomes and parental cells were prepared as described herein by the method of Examples 67 and 86. Exosomes were prepared as described herein for fusosomes by the method of Examples 67 and 86 with the exception that the parental cells were not transfected with VSV-G or GFP. Protein quantification by mass spectrometry for fusosomes and exosomes was performed as described herein in Example 35. The resulting protein quantification data was analyzed to determine protein levels and proportions of known exosomal, endoplasmic reticulum, ribosome, nuclear, and mitochondrial proteins as annotated by Gene Ontology Cellular Compartment annotation terms (exosome: GO:0070062, endoplasmic reticulum: GO:0005783, ribosome: GO:0005840, GO:0022625, GO:0022626, GO:0022627, GO:0044391, GO:0042788, GO:0000313) with evidence code IDA (inferred by direct assay). The fraction of compartment-specific proteins relative to total protein in each sample was determined for fusosome samples, exosome samples, and parental cells.

[1344] As shown in FIG. 20, fusosomes were found to be depleted with endoplasmic reticulum protein compared to parental cells and exosomes. Fusosomes were also found to be depleted for exosomal protein compared to exosomes. Fusosomes were depleted for mitochondrial protein compared to parental cells. Fusosomes were enriched for nuclear protein compared to parental cells. Fusosomes were enriched for ribosomal proteins compared to parental cells and exosomes.

### Example 98: Measuring TSG101 and ARRDC1 Content in Fusosomes

[1345] This Example describes quantification of the proportion of proteins that are known to be important in fusosome release from cells.

[1346] Fusosomes and parental cells were prepared as described herein by the method of Examples 67 and 86. Exosomes were prepared as described herein for fusosomes by the method of Examples 67 and 86 with the exception that the parental cells were not transfected with VSV-G or GFP. Protein quantification by mass spectrometry for fusosomes and exosomes was performed as described herein in Example 35. The resulting protein quantification data was analyzed to determine protein levels and proportions of the protein TSG101 and ARRDC1. Average log intensities per group were calculated by adding 1 to intensity values from mass spectrometry, transforming by log10, and computing the mean across replicates. The percentage of total protein content of TSG101 or ARRDC1 in fusosomes relative to exosomes or parental cells was determined as the average log intensity of TSG101 or ARRDC1 for each sample, divided by the sum of intensities of all proteins in the same sample, averaged over replicates and expressed as a percent.

[1347] As shown in FIG. 21, ARRDC1 was found to be present at greater levels as a percentage of total protein content in fusosomes than in parental cells or exosomes. The level of ARRDC1 as a percentage of total protein content was at least 0.02% in fusosomes. TSG101 was found to be present at greater levels as a percentage of total protein content in fusosomes than in parental cells or exosomes. The level of TSG101 as a percentage of total protein content was at least 0.004% in fusosomes.

### Example 99: Measuring Serum Inactivation of Fusosomes after Multiple Administrations

[1348] This Example describes quantification of serum inactivation of fusosomes using an in vitro delivery assay following multiple administrations of the fusosome. It is contemplated that a modified fusosome, e.g., modified by a method described herein, can have a reduced (e.g., reduced compared to administration of an unmodified fusosome) serum inactivation following multiple (e.g., more than one, e.g., 2 or more), administrations of the modified fusosome. In some instances, a fusosome described herein will not be inactivated by serum following multiple administrations.

[1349] A measure of immunogenicity for fusosomes is serum inactivation. In an embodiment, repeated injections of a fusosome can lead to the development of anti-fusosome antibodies, e.g., antibodies that recognize fusosomes. In an embodiment, antibodies that recognize fusosomes can bind in a manner that can limit fusosome activity or longevity and mediate complement degradation.

[1350] In this Example, serum inactivation is examined after one or more administrations of fusosomes. Fusosomes are produced by any one of the previous Examples. In this example, fusosomes are generated from: HEK293 cells modified with a lentiviral-mediated expression of HLA-G (hereafter HEK293-HLA-G), and HEK293 modified with a lentiviral-mediated expression of an empty vector (hereafter HEK293). In some embodiments, fusosomes are derived from cells that are expressing other immunoregulatory proteins.

[1351] Serum is drawn from the different cohorts: mice injected systemically and/or locally with 1, 2, 3, 5, 10 injections of vehicle (Fusosome naïve group), HEK293-HLA-G fusosomes, or HEK293 fusosomes. Sera are collected from mice by collecting fresh whole blood and allowing it to clot completely for several hours. Clots are pelleted by centrifugation and the serum supernatants are removed. A negative control is heat inactivated mouse serum. Negative control samples are heated at 56 degrees Celsius for 1 hour. Serum may be frozen in aliquots.

[1352] The fusosomes are tested for the dose at which 50% of cells in a recipient population receive the payload in the fusosomes. The fusosomes may be produced via any of the other examples described herein and may contain any of the payloads described herein. Many methods for assaying fusosome delivery of a payload to recipient cells are also described herein. In this particular example, the payload is Cre protein and the recipient cells are RPMI8226 cell which stably-expresses “LoxP-GFP-stop-LoxP-RFP” cassette under a CMV promoter, which upon recombination by Cre switches from GFP to RFP expression, indicating fusion and Cre, as a marker, of delivery. The identified dose at which 50% of the recipient cells are RFP positive is used for further experiments. In other embodiments, the identified dose at which 50% of the recipient cells receive the payload is used for further experiments.

[1353] To assess serum inactivation of fusosomes, fusosomes are diluted 1:5 into normal or heat-inactivated serum (or medium containing 10% heat-inactivated FBS as the no-serum control) and the mixture is incubated at 37 C for 1 h. Following the incubation, medium is added to the reaction for an additional 1:5 dilution and then serially diluted twice at a 1:10 ratio. Following this step, the fusosomes should be present at the previously identified dose at which 50% of the recipient cells have received the payload (e.g. are RFP positive). It is contemplated that the identified dose at which 50% of recipient cells receive the payload may be similar across fusosomes.

[1354] Fusosomes that have been exposed to serum are then incubated with recipient cells. The percent of cells which receive the payload, and thus are RFP positive, is calculated. The percent of cells which receive the payload may not be different between fusosome samples that have been incubated with serum and heat-inactivated serum from mice treated with HEK293-HLA-G fusosomes, indicating that there is not serum inactivation of fusosomes or an adaptive immune response. The percent of cells that receive the payload may not be different between fusosome samples that have been incubated from mice treated 1, 2, 3, 5 or 10 times with HEK293-HLA-G fusosomes, which would indicate that there was not serum inactivation of fusosomes or an adaptive immune response. In some instances, the percent of cells which receive the payload is not different between fusosome samples that have been incubated with serum from mice treated with vehicle and from mice treated with HEK293-HLA-G fusosomes, indicating that there is not serum inactivation of fusosomes or an adaptive immune response. In some instances, the percent of cells which receive the payload is less for fusosomes derived with HEK293 than for HEK293-HLA-G fusosomes, indicating that there is not serum inactivation of HEK293-HLA-G fusosomes or an adaptive immune response.

### Example 100: Measuring Complement Targeting of Fusosomes

[1355] This Example describes quantification of complement activity against fusosomes using an in vitro assay. It is contemplated that a modified fusosome described herein can induce reduced complement activity compared to a corresponding unmodified fusosome.

[1356] In this Example, serum from a mouse is assessed for complement activity against a fusosome. The example measures the level of complement C3a, which is a central node in all complement pathways. Notably, the methods described herein may be equally applicable to humans, rats, monkeys with optimization to the protocol.

[1357] In this Example, fusosomes are produced by any one of the previous Examples. Fusosomes are generated from HEK293 cells modified with a lentiviral-mediated expression of a complement regulatory protein DAF (HEK293-DAF fusosomes) or HEK 293 cells not expressing a complementary regulatory protein (HEK293 fusosomes). Other complement regulatory proteins may also be used, such as proteins that bind decay-accelerating factor (DAF, CD55), e.g. factor H (FH)-like protein-1 (FHL-1), e.g. C4b-binding protein (C4BP), e.g. complement receptor 1 (CD35), e.g. Membrane cofactor protein (MCP, CD46), eg. Profectin (CD59), e.g. proteins that inhibit the classical and alternative complement pathway CD/C5 convertase enzymes, e.g. proteins that regulate MAC assembly

[1358] Serum is recovered from naïve mice, mice that are administered HEK293-DAF fusosomes, or mice that are administered HEK293 fusosomes. Sera are collected from mice by collecting fresh whole blood and allowing it to clot completely for several hours. Clots are pelleted by centrifugation and the serum supernatants are removed. A negative control is heat inactivated mouse serum. Negative control samples are heated at 56 degrees Celsius for 1 hour. Serum may be frozen in aliquots.

[1359] The different fusosomes are tested for the dose at which 50% of cells in a recipient population receive the payload in the fusosomes. The fusosomes may be produced via any of the other examples described herein and may contain any of the payloads described herein. Many methods for assaying fusosome delivery of a payload to recipient cells are also described herein. In this particular example, the payload is Cre protein and the recipient cells are RPMI8226 cell which stably-expresses “LoxP-GFP-stop-LoxP-RFP” cassette under a CMV promoter, which upon recombination by Cre switches from GFP to RFP expression, indicating fusion and Cre, as a marker, of delivery. The identified dose at which 50% of the recipient cells are RFP positive is used for further experiments. In other embodiments, the identified dose at which 50% of the recipient cells receive the payload is used for further experiments. In preferred embodiments, the identified dose at which 50% of recipient cells receive the payload is similar across fusosomes.

[1360] Two-fold dilutions of the fusosomes starting at the dose of fusosomes at which 50% of the recipient cells receive the payload in phosphate-buffered saline (PBS, pH 7.4) are mixed with a 1:10 dilution of the sera from mice treated with the same fusosomes or naïve mice (assay volume, 20 μl) and incubated for 1 h at 37° C. The samples are further diluted 1:500 and used in an enzyme-linked immunosorbent assay (ELISA) specific for C3a. The ELISA is mouse complement C3a ELISA Kit product LS-F4210 sold by LifeSpan BioSciences Inc, which measures the concentration of C3a in a sample. The dose of fusosomes at which 200 pg/ml of C3a is present is compared across sera isolated from mice.

[1361] In some instances, the dose of fusosomes at which 200 pg/ml of C3a is present is greater for HEK293-DAF fusosomes incubated with HEK-293 DAF mouse sera than for HEK293 fusosomes incubated with HEK293 mouse sera, indicating that complement activity targeting fusosomes is greater in mice treated with HEK293 fusosomes than HEK293-DAF fusosomes. In some instances, the dose of fusosomes at which 200 pg/ml of C3a is present is greater for HEK293-DAF fusosomes incubated with naive mouse sera than for HEK293 fusosomes incubated with naive mouse sera, indicating that complement activity targeting fusosomes is greater in mice treated with HEK293 fusosomes than HEK293-DAF fusosomes.

The application's sequence listing, which the Patent Office published only in electronic form, follows.

SEQUENCE LISTING (162 sequences)

SEQ ID NO: 1 - protein, 589 aa, human respiratory syncytal virus
  MISC_FEATURE: fusion glycoprotein
MIPQARTELNLGQITMELLIHRSSAIFLTLAINALYLTSSQNITEEFYQSTCSAVSRGYLSALRTGWYTSVITIELSNIKETKCNGTDTKVKLIKQELDKYKNAVTELQLLMQNTPAANNRARREAPQYMNYTINTTGSLNVSISKKRKRRFLGFLLGVGSAIASGIAVSKVLHLEGEVNKIKNALLSTNKAVVSLSNGVSVLTSKVLDLKNYINNQLLPIVNQQSCRISNIETVIEFQQKNSRLLEITREFSVNAGVTTPLSTYMLTNSELLSLINDMPITNDQKKLMSSNVQIVRQQSYSIMSIIKEEVLAYVVQLPIYGVIDTPCWKLHTSPLCTTNIKEGSNICLTRTDRGWYCDNAGSVSFFPQADTCKVQSNRVFCDTMNSLTLPSEVSLCNTDIFNSKYDCKIMTSKTDISSSVITSLGAIVSCYGKTKCTASNKNRGIIKTFSNGCDYVSNKGVDTVSVGNTLYYVNKLEGKNLYVKGEPIINYYDPLVFPSDEFDASISQVNEKINQSLAFIRRSDELLHNVNTGKSTTNIMITAIIIVIIVVLLSLIAIGLLLYCKAKNTPVTLSKDQLSGINNIAFSK

SEQ ID NO: 2 - protein, 553 aa, Newcastle disease virus
  MISC_FEATURE: fusion protein
MDPKPSTSYLHAFPLIFVAISLVFMAGRASALDGRPLAAAGIVVTGDKAVNIYTSSQTGTIIIKLLPNMPKDKEQCAKSPLDAYNRTLTTLLAPLGDSIRRIQESVTTSGGERQERLVGAIIGGVALGVATAAQITAASALIQANQNAANILKLKESIAATNEAVHEVTSGLSQLAVAVGKMQQFVNDQFNKTAQEIDCIKITQQVGVELNLYLTELTTVFGPQITSPALTQLTIQALYNLAGGNMDYMLTKLGVGNNQLSSLISSGLISGNPILYDSQTQLLGIQVTLPSVGNLNNMRATYLETLSVSTNKGFASALVPKVVTQVGSVIEELDTSYCIETDLDLYCTRIVTFPMSPGIFSCLGGNTSACMYSKTEGALTTPYMTLKGSVIANCKMTTCRCADPPGIISQNYGEAVSLIDKKVCNILTLDGITLRLSGEFDATYQKNISIQDSQVVITGNLDISTELGNVNNSISNALDKLEESNSKLDKVNVRLTSTSALITYIVLTTIALICGIVSLVLACYIMYKQKAQQKTLLWLGNNTLDQMRATTKM

SEQ ID NO: 3 - protein, 553 aa, measels virus strain AIK-C
  MISC_FEATURE: fusion protein
MSIMGLKVNVSAIFMAVLLTLQTPTGQIHWGNLSKIGVVGIGSASYKVMTRSSHQSLVIKLMPNITLLNNCTRVEIAEYRRLLRTVLEPIRDALNAMTQNIRPVQSVASSRRHKRFAGVVLAGAALGVATAAQITAGIALHQSMLNSQAIDNLRASLETTNQAIEAIRQAGQEMILAVQGVQDYINNELIPSMNQLSCDLIGQKLGLKLLRYYTEILSLFGPSLRDPISAEISIQALSYALGGDINKVLEKLGYSGGDLLGILESRGIKARITHVDTESYFIVLSIAYPTLSEIKGVIVHRLEGVSYNIGSQEWYTTVPKYVATQGYLISNFDESSCTFMPEGTVCSQNALYPMSPLLQECLRGYTKSCARTLVSGSFGNRFILSQGNLIANCASILCKCYTTGTIINQDPDKILTYIAADNCPVVEVNGVTIQVGSRRYPDAVYLHRIDLGPPILLERLDVGTNLGNAIAKLEDAKELLESSDQILRSMKGLSSTCIVYILIAVCLGGLIGIPALICCCRGRCNKKGEQVGMSRPGLKPDLTGTSKSYVRSL

SEQ ID NO: 4 - protein, 539 aa, Human metapneumovirus
  MISC_FEATURE: fusion glycoprotein precursor
MSWKVVIIFSLLITPQHGLKESYLEESCSTITEGYLSVLRTGWYTNVFTLEVGDVENLTCSDGPSLIKTELDLTKSALRELKTVSADQLAREEQIEKPRQSRFVLGAIALGVATAAAVTAGVAIAKTIRLESEVTAIKNALKTTNEAVSTLGNGVRVLATAVRELKDFVSKNLTRAINKNKCDIDDLKMAVSFSQFNRRFLNVVRQFSDNAGITPAISLDLMTDAELARAVSNMPTSAGQIKLMLENRAMVRRKGFGILIGVYGSSVIYMVQLPIFGVIDTPCWIVKAAPSCSEKKGNYACLLREDQGWYCQNAGSTVYYPNEKDCETRGDHVFCDTAAGINVAEQSKECNINISTTNYPCKVSTGRHPISMVALSPLGALVACYKGVSCSIGSNRVGIIKQLNKGCSYITNQDADTVTIDNTVYQLSKVEGEQHVIKGRPVSSSFDPIKFPEDQFNVALDQVFENIENSQALVDQSNRILSSAEKGNTGFIIVIILIAVLGSSMILVSIFIIIKKTKKPTGAPPELSGVTNNGFIPHS

SEQ ID NO: 5 - protein, 540 aa, Bovine parainfluenza virus 3
  MISC_FEATURE: fusion protein
MIIIVITMILSLTPSSLCQIDITKLQSVGVLVNSPKGIKISQNFETRYLILSLIPKIEDSHSCGNQQIDQYKKLLDRLIIPLYDGLKLQKDVIVVNHESHNNTNLRTKRFFGEIIGTIAIGIATSAQITAAVALVEAKQARSDIDKLKEAIKDTNKAVQSIQSSVGNLIVAVKSVQDYVNNEIVPSITRLGCEAAGLQLGIALTQHYSELTNIFGDNIGTLGEKGVKLQGIASLYRTNITEVFTTSTVDQYDIYDLLFTESIKMRVIDVDLSDYSITLQVRLPLLTKVSNTQIYKVDSISYNIQGKEWYIPLPHHIMTKGAFLGGADIKECIESFSNYICPSDPGFILNHEMENCLSGNITQCPKTIVTSDIVPRYAFVDGGVIANCIPTTCTCNGIDNRINQSPDQGIKIITYKECQIVGINGMLFKTNQEGTLAKYTFDNIKLNNSVALNPIDISLELNKAKSDLEESKRWIEKSNQKLDSIGSWHQSSVTIIIIIVMIVVLLIINAIIIMIMIRYLRDRNRHLNNKDSEPYVLTNRQ

SEQ ID NO: 6 - protein, 538 aa, mumps virus
  MISC_FEATURE: fusion protein
MKVFLVTCLGFAVFSSSVCVNINILQQIGYIKQQVRQLSYYSQSSSSYIVVKLLPNIQPTDNSCEFKSVTQYNKTLSNLLLPIAENINNIASPSSGSRRHKRFAGIAIGIAALGVATAAQVTAAVSLVQAQTNARAIAAMKNSIQATNRAVFEVKEGTQRLAIAVQAIQDHINTIMNTQLNNMSCQILDNQLATSLGLYLTELTTVFQPQLINPALSPISIQALRSLLGSMTPAVVQATLSTSISAAEILSAGLMEGQIVSVLLDEMQMIVKINIPTIVTQSNALVIDFYSISSFINNQESIIQLPDRILEIGNEQWSYPAKNCKLTRHHIFCQYNEAERLSLESKLCLAGNISACVFSPIAGSYMRRFVALDGTIVANCRSLTCLCKSPSYPIYQPDHHAVTTIDLTACQTLSLDGLDFSIVSLSNITYAENLTISLSQTINTQPIDISTELSKVNASLQNAVKYIKESNHQLQSVNVNSKIGAIIVAALVLSILSIIISLLFCCWAYVATKEIRRINFKTNHINTISSSVDDLIRY

SEQ ID NO: 7 - protein, 671 aa, canine distemper virus
  MISC_FEATURE: fusion protein
MNPHEQTIPMHEKIPKRSKTQTHTQQDLPQQHSTKSAESKTSRARHSITSAQRSTHYDPRTADWPDYYIMKRTRSCKQASYRSDNIPAHGDHDGIIHHTPESVSQGAKSRLKMGQSNAVKSGSQCTWLVLWCIGVASLFLCSKAQIHWNNLSTIGIIGTDSVHYKIMTRPSHQYLVIKLMPNVSLIDNCTKAELDEYEKLLSSILEPINQALTLMTKNVKPLQSVGSGRRQRRFAGVVLAGAALGVATAAQITAGIALHQSNLNAQAIQSLRTSLEQSNKAIEEIREATQETVIAVQGVQDYVNNELVPAMQHMSCELVGQRLGLKLLRYYTELLSIFGPSLRDPISAEISIQALSYALGGEIHKILEKLGYSGNDMIAILESRGIKTKITHVDLPGKFIILSVSYPTLSEVKGVIVHRLEAVSYNIGSQEWYTTVPRYVATNGYLISNFDESSCVFVSESAICSQNSLYPMSPLLQQCIRGDTSSCARTLVSGTMGNKFILSKGNIVANCASILCKCYSTSTIINQSPDKLLTFIASDTCPLVEIDGVTIQVGSRQYPDMVYESKVALGPAISLERLDVGTNLGNALKKLDDAKVLIDSSNQILETVRRSSFNFGSLLSVPILSCTALALLLLICCCKRRYQQTHKQNTKVDPTFKPDLTGTSRSYVRSL

SEQ ID NO: 8 - protein, 546 aa, Peste-des-petits-ruminants virus
  MISC_FEATURE: fusion protein
MTRVAILTFLFLFPNAVACQIHWGNLSKIGIVGTGSASYKVMTRPSHQTLVIKLMPNITAIDNCTKSEIAEYKRLLITVLKPVEDALSVITKNVRPIQTLTPGRRTRRFAGAVLAGVALGVATAAQITAGVALHQSLMNSQAIESLKTSLEKSNQAIEEIRLANKETILAVQGVQDYINNELVPSVHRMSCELVGHKLGLKLLRYYTEILSIFGPSLRDPIAAEISIQALSYALGGDINRILDKLGYSGGDFLAILESKGIKARVTYVDTRDYFIILSIAYPTLSEIKGVIVHKIEAITYNIGAQEWYTTIPKYVATQGYLISNFDETSCVFTPDGTVCSQNALYPMSPLLQECFQGSTKSCARTLVSGTISNRFILSKGNLIANCASVLCKCYTTETVISQDPDKLLTVVASDKCPVVEVDGVTIQVGSREYPDSVYLHKIDLGPAISLEKLDVGTNLGNAVTRLENAKELLDASDQILKTVKGVPFGGNMYIALAACIGVSLGLVTLICCCKGRCKNKEVPISKINPGLKPDLTGTSKSYVRSL

SEQ ID NO: 9 - protein, 546 aa, Hendra virus
  MISC_FEATURE: fusion protein
MATQEVRLKCLLCGIIVLVLSLEGLGILHYEKLSKIGLVKGITRKYKIKSNPLTKDIVIKMIPNVSNVSKCTGTVMENYKSRLTGILSPIKGAIELYNNNTHDLVGDVKLAGVVMAGIAIGIATAAQITAGVALYEAMKNADNINKLKSSIESTNEAVVKLQETAEKTVYVLTALQDYINTNLVPTIDQISCKQTELALDLALSKYLSDLLFVFGPNLQDPVSNSMTIQAISQAFGGNYETLLRTLGYATEDFDDLLESDSIAGQIVYVDLSSYYIIVRVYFPILTEIQQAYVQELLPVSFNNDNSEWISIVPNFVLIRNTLISNIEVKYCLITKKSVICNQDYATPMTASVRECLTGSTDKCPRELVVSSHVPRFALSGGVLFANCISVTCQCQTTGRAISQSGEQTLLMIDNTTCTTVVLGNIIISLGKYLGSINYNSESIAVGPPVYTDKVDISSQISSMNQSLQQSKDYIKEAQKILDTVNPSLISMLSMIILYVLSIAALCIGLITFISFVIVEKKRGNYSRLDDRQVRPVSNGDLYYIGT

SEQ ID NO: 10 - protein, 565 aa, Sendai virus
  MISC_FEATURE: fusion protein
MATYIQRVQCISALLSVVLTTLVSCQIPRDRLSNIGVIVDEGKSLKIAGSHESRYIVLSLVPGIDLENGCGTAQVIQYKSLLNRLLIPLRDALDLQEALITVTNDTMTGADVPQSRFFGAVIGTIALGVATSAQITAGIALAEAREAKRDIALIKESMTKTHKSIELLQNAVGEQILALKTLQDFVNDEIKPAISELGCETAALRLGIKLTQHYSELLTAFGSNFGTIGEKSLTLQALSSLYSANITEIMTTIRTGQSNIYDVIYTEQIKGTVIDVDLERYMVTLSVKIPILSEVPGVLIHKASSISYNIDGEEWYVTVPSHILSRASFLGGANIADCVESRLTYICPRDPAQLIPDSQQKCILGDTTRCPVTKVVDNIIPKFAFVNGGVVANCIASTCTCGTGRRPISQDRSKGVVFLTHDNCGLIGVNGIELYANRKGHDATWGVQNLTVGPAIAIRPVDISLNLAAATDFLQDSRAELEKARKILSEVGRWYNSGATLITIIVVMIVVLVVIIVIVIVLYRLRRSMLMSNPAGRISRDTYTLEPKIRHMYTNGGFDAMTEKR

SEQ ID NO: 11 - protein, 555 aa, Human parainfluenza virus 1 strain Washington/1964
  MISC_FEATURE: F glycoprotein
MQKSEILFLVYSSLLLSSSLCQIPVEKLSNVGVIINEGKLLKIAGSYESRYIVLSLVPSIDLQDGCGTTQIIQYKNLLNRLLIPLKDALDLQESLITITNDTTVTNDNPQTRFFGAVIGTIALGVATAAQITAGIALAEAREARKDIALIKDSIVKTHNSVELIQRGIGEQIIALKTLQDFVNDEIRPAIGELRCETTALKLGIKLTQHYSELATAFSSNLGTIGEKSLTLQALSSLYSANITEILSTTKKDKSDIYDIIYTEQVKGTVIDVDLEKYMVTLLVKIPILSEIPGVLIYRASSISYNIEGEEWHVAIPNYIINKASSLGGADVTNCIESKLAYICPRDPTQLIPDNQQKCILGDVSKCPVTKVINNLVPKFAFINGGVVANCIASTCTCGTNRIPVNQDRSRGVTFLTYTNCGLIGINGIELYANKRGRDTTWGNQIIKVGPAVSIRPVDISLNLASATNFLEESKTELMKARAIISAVGGWHNTESTQIIMIIIVCILIIIICGILYYLYRVRRLLVMINSTHNSPVNAYTLESRMRNPYMGNNSN

SEQ ID NO: 12 - protein, 543 aa, Feline morbillivirus
  MISC_FEATURE: fusion protein
MGKIRVIIISSLLLSNITTAQVGWDNLTSIGVISTKQYDYKITTLNTNQLMVIKMVPNISSIINCTKPELMKYRELVLGVIRPINESLELMNSYINMRAGSERFIGAVIAGVALGVATAAQITSGIALHNSIMNKRQIQELRKALSTTNKAIDEIRIAGERTLIAVQGVQDYINNIIIPMQDKLQCDILSSQLAIALLRYYTNILTVFGPSIRDPVTSIISIQALSQAFNGNLQALLDGLGYTGRDLRDLLESRSITGQIIHADMTDLFLVLRINYPSITEMQGVTIYELNSITYHIGPEEWYTIMPNFIAVQGFLTSNFDERKCSITKSSILCQQNSIYPMSTEMQRCIKGEIRFCPRSKAVGTLVNRFILTKGNLMANCLGVICRCYSSGQIITQDPSKLITIISQEECKEVGVDGIRIMVGPRKLPDVIFNARLEVGVPISLSKLDVGTDLAIASAKLNNSKALLEQSDKILDSMSKLDSINSRITGLILAIMAIFIITVTIIWIIYKRCRNKDNKFSTSIEPLYIPPSYNSPHSVVKSI

SEQ ID NO: 13 - protein, 534 aa, Avian paramyxovirus 2
  MISC_FEATURE: fusion protein
MIAALFISLFATCGALDNSVLAPVGIASAQEWQLAAYTNTLSGTIAVRFVPVLPGNLSTCAQATLAEYNKTVTNILGPLKENLETLLSEPTKTAARFVGAIIGTVALGVATSAQITAAVALNQAQENARNIWRLKESIRKTNEAVLELKDGLASTAIALDKVQKFINEDIIPQIKEIDCQVVANKLGVYLSLYLTELTTIFGAQITNPALTPLSYQALYNLCGGDMGKLTELIGVKAKDINSLYEANLITGQVIGYDSESQIILIQVSYPSVSEVTGVRATELVTVSVTTPKGEGRAIAPKYVAQSRVVTEELDTSTCRFSKTTLYCRSIITRPLPPLIANCLNGLYQDCQYTTEIGALSSRFITVNGGIIANCRATICKCVNPPKIIVQSDASSLTVIDSAICKDVVLDNVQLRLEGKLSAQYFTNITIDLSQITTSGSLDISSEIGSINNTVNKVEELIAESNAWLQAVNPHLVNNTSIIVLCVLAAIFVVWLVALTGCLAYYIKKSSATRMVGIGSSPAGNPYVAQSATKM

SEQ ID NO: 14 - protein, 555 aa, avian paramyxovirus 6
  MISC_FEATURE: fusion protein
MGARLGPLAMAPGRYVIIFNLILLHRVVSLDNSRLLQQGIMSATEREIKVYTNSITGSIAVRLIPNLPQEVLKCSAGQIKSYNDTLNRIFTPIKANLERLLATPSMLEDNQNPAPEPRLIGAIIGTAALGLATAAQVTAALALNQAQDNAKAILNLKESITKTNEAVLELKDATGQIAIALDKTQRFINDNILPAINNLTCEVAGAKVGVELSLYLTELSTVFGSQITNPALSTLSIQALMSLCGNDFNYLLNLMGAKHSDLGALYEANLINGRIIQYDQASQIMVIQVSVPSISSISGLRLTELFTLSIETPVGEGKAVVPQFVVESGQLLEEIDTQACTLTDTTAYCTIVRTKPLPELVAQCLRGDESRCQYTTGIGMLESRFGVFDGLVIANCKATICRCLAPEMIITQNKGLPLTVISQETCKRILIDGVTLQIEAQVSGSYSRNITVGNSQIAPSGPLDISSELGKVNQSLSNVEDLIDQSNQLLNRVNPNIVNNTAIIVTIVLLVLLVLWCLALTISILYVSKHAVRMIKTVPNPYVMQAKSPGSATQF

SEQ ID NO: 15 - protein, 545 aa, Fer-de-Lance paramyxovirus
  MISC_FEATURE: fusion protein F
MTRITILQIILTLTLPVMCQVSFDNLEQVGVMFDKPKFLKITGPASTATMIIKLIPTLGTMESCGTSAVNEYKKTLDTILVPLRDTINKLSTDITVVEGTSNISNKREKRFVGIAIAVGAVALATSAQITAGIALSNTIKNAEAIESIKSSIQASNQAIQKVIDAQGRTVTVINGIQDHINSVINPALNQLGCDVAKNTLAISLTQYFSKLSLLFGPNLRNPVEQPLSVQAIAGLMDGDINAVVSQLGYTQSDLLDLLSTESIVGTVTAIDMVNYMIQIEMSFPQYITIPDTKVLEGHKITFNDKGSEWQTQVPSTIAVRDILIAGVDPDGCSITSTSYICKNDPTYAMSEVLTNCFRGNTQECPRARITSTFATRFAIARSTVIANCVAAVCLCGDPGIPVVQKAEVTLTAMTLDQCSLITVDGLQIKPSKSIANVTANFGNITLGPVVSVGDLDLSAELTKVQSDLKEAQDKLDESNAILQGINNKILTAPTSIALIVVSVVVILLIIGMISWLVWLTKAVRRSNTRSERVTPSAYNNLGFIK

SEQ ID NO: 16 - protein, 566 aa, Avian paramyxovirus 4
  MISC_FEATURE: fusion protein
MRLSRTILTLILGTLTGYLMGAHSTNVNEGPKSEGIRGDLIPGAGIFVTQVRQLQIYQQSGYHDLVIRLLPLLPAELNDCQREVVTEYNNTVSQLLQPIKTNLDTLLADGGTRDADIQPRFIGAIIATGALAVATVAEVTAAQALSQSKTNAQNILKLRDSIQATNQAVFEISQGLEATATVLSKLQTELNENIIPSLNNLSCAAMGNRLGVSLSLYLTLMTTLFGDQITNPVLTPISYSTLSAMAGGHIGPVMSKILAGSVTSQLGAEQLIASGLIQSQVVGYDSQYQLLVIRVNLVRIQEVQNTRVVSLRTLAVNRDGGLYRAQVPPEVVERSGIAERFYADDCVLTTTDYICSSIRSSRLNPELVKCLSGALDSCTFERESALLSTPFFVYNKAVVANCKAATCRCNKPPSIIAQYSASALVTITTDTCADLEIEGYRFNIQTESNSWVAPNFTVSTSQIVSVDPIDISSDIAKINSSIEAAREQLELSNQILSRINPRIVNDESLIAIIVTIVVLSLLVIGLIVVLGVMYKNLKKVQRAQAAMMMQQMSSSQPVTTKLGTPF

SEQ ID NO: 17 - protein, 551 aa, Human parainfluenza virus 2
  MISC_FEATURE: fusion protein
MHHLHPMIVCIFVMYTGIVGSDAIAGDQLLNIGVIQSKIRSLMYYTDGGASFIVVKLLPNLPPSNGTCNITSLDAYNVTLFKLLTPLIENLSKISTVTDTKTRQKRFAGVVVGLAALGVATAAQITAAVAIVKANANAAAINNLASSIQSTNKAVSDVIDASRTIATAVQAIQDRINGAIVNGITSASCRAHDALIGSILNLYLTELTTIFHNQITNPALTPLSIQALRILLGSTLPIVIESKLNTNFNTAELLSSGLLTGQIISISPMYMQMLIQINVPTFIMQPGAKVIDLIAISANHKLQEVVVQVPNRILEYANELQNYPANDCVVTPNSVFCRYNEGSPIPESQYQCLRGNLNSCTFTPIIGNFLKRFAFANGVLYANCKSLLCRCADPPHVVSQDDTQGISIIDIKRCSEMMLDTFSFRITSTFNATYVTDFSMINANIVHLSPLDLSNQINSINKSLKSAEDWIADSNFFANQARTAKTLYSLSAIALILSVITLVVVGLLIAYIIKLVSQIHQFRSLAATTMFHRENPAFFSKNNHGNIYGIS

SEQ ID NO: 18 - protein, 541 aa, Porcine rubulavirus
  MISC_FEATURE: fusion protein
MPQQQVAHTCVMLWGIISTVSGINTEALSQYGVVVTNVRQLTYYTQAGSTYLAVRLLPSLASPDQSCALHSIINYNATLQAILSPIAENLNLISTALREQHRKKRFAGVAIGLTALGVATAAQATAAVALVRANKNAEKVEQLSQALGETNAAISDLIDATKNLGFAVQAIQNQINTAILPQIHNLSCQVIDAQLGNILSLYLTELTTVFQPQLTNPALSPLTIQALRAVLGTTLPALLSEKLKSNIPLGDLMSSGLLKGQLVGLNLQNMLMIIELYIPTLSTHSTAKVLDLVTISSHVNGREVEIQVPNRVLELGSEVLGYGGSECALTMSHILCPFNDARVLSTDMKYCLQGNITHCIFSPVVGSFLRRFALVNGVVIANCADMSCVCFDPQEIIYQNFQEPTTVIDIKKCGKVQLDTLTFTISTFANRTYGPPAYVPPDNIIQSEPLDISGNLIAVNNSLSSALNHLATSEILRNEQIWTSSLGISTIVALVIIGILIICLVVTWAALWALLKEVRGLNSAVNSQLSSYVMGDKFIRY

SEQ ID NO: 19 - protein, 551 aa, Parainfluenza virus 5
  MISC_FEATURE: fusion protein
MGTRIQFLMVSCLLAGTGSLDPAALMQIGVIPTNVRQLMYYTEASSAFIVVKLMPTIDSPISGCNITSISSYNATMTKLLQPIGENLETIRYQLIPTRRRRRFVGVVIGLAALGVATAAQVTAAVALVKANKNAAAILNLKNAIQKTNAAVADVVQATQSLGTAVQAVQDHINSVVSPAITAANCKAQDAIIGSILNLYLTELTTIFHNQITNPALSPITIQALRILLGSTLPTVVRKSFNTQISAAELLSSGLLTGQIVGLDLTYMQMVIKIELPTLTVQPATQIIDLVTISAFINNREVMAQLPTRIIVTGSLIQAYPASQCTITPNTVYCRYNDAQVLSDDTMACLQGNLTRCTFSPVVGSFLTRFVLFDGIVYANCRSMLCKCMQPAAVILQPSSSPVTVIDMHKCVSLQLDNLRFTITQLANITYNSTIKLETSQILPIDPLDISQNLAAVNKSLSDALQHLAQSDTYLSAITSATTTSVLSIIAICLGSLGLILIILISVVVWKLLTIVAANRNRMENFVYHNSAFHHSRSDLSEKNQPATLGTR

SEQ ID NO: 20 - protein, 537 aa, Murine pneumonia virus
  MISC_FEATURE: fusion glycoprotein precursor
MIPGRIFLVLLVIFNTKPIHPNTLTEKFYESTCSVETAGYKSALRTGWHMTVMSIKLSQINIESCKSSNSLLAHELAIYSSAVDELRTLSSNALKSKRKKRFLGLILGLGAAVTAGVALAKTVQLESEIALIRDAVRNTNEAVVSLTNGMSVLAKVVDDLKNFISKELLPKINRVSCDVHDITAVIRFQQLNKRLLEVSREFSSNAGLTHTVSSFMLTDRELTSIVGGMAVSAGQKEIMLSSKAIMRRNGLAILSSVNADTLVYVIQLPLFGVMDTDCWVIRSSIDCHNIADKYACLARADNGWYCHNAGSLSYFPSPTDCEIHNGYAFCDTLKSLTVPVTSRECNSNMYTTNYDCKISTSKTYVSTAVLTTMGCLVSCYGHNSCTVINNDKGIIRTLPDGCHYISNKGVDRVQVGNTVYYLSKEVGKSIVVRGEPLVLKYDPLSFPDDKFDVAIRDVEHSINQTRTFLKASDQLLDLSENRENKNLNKSYILTTLLFVVMLIIIMAVIGFILYKVLKMIRDNKLKSKSTPGLTVLS

SEQ ID NO: 21 - protein, 543 aa, Human parainfluenza virus 4a
  MISC_FEATURE: fusion protein
MGVKGLSLIMIGLLISPITNLDITHLMNLGTVPTAIRSLVYYTYTKPSYLTVDLIPNLKNLDQNCNYSSLNYYNKTALSLIQPIADNINRLTKPITSSEIQSRFFGAVIGTIALGVATAAQVTAAIGLAKAQENAKLILTLKKAATETNEAVRDLANSNKIVVKMISAIQNQINTIIQPAIDQINCQIKDLQVANILNLYLTEITTVFHNQLTNPALESISIQALKSLLGPTLPEVLSKLDLNNISAASVMASGLIKGQIIAVDIPTMTLVLMVQIPSISPLRQAKIIDLTSITIHTNSQEVQAVVPARFLEIGSEILGFDGSVCQITKDTIFCPYNDAYELPIQQKRCLQGQTRDCVFTPVAGTFPRRFLTTYGTIVANCRDLVCSCLRPPQIIYQPDENPVTIIDKDLCTTLTLDSITIEIQKSINSTFRREVVLESTQVRSLTPLDLSTDLNQYNQLLKSAEDHIQRSTDYLNSINPSIVNNNAIIILIILCILLILTVTICIIWLKYLTKEVKNVARNQRLNRDADLFYKIPSQIPVPR

SEQ ID NO: 22 - protein, 538 aa, Tioman virus
  MISC_FEATURE: fusion protein
MRIALTAVIVSIHFDLAFPMNKNSLLSVGLVHKSVKNLYFYSQGSPSYIVVKLVPTLGNVPGNCTLNSLVRYKSTVSSLLSPLAENLEYLQKTLTVSRGGRRRRFAGVAIGLAALGVAAAAQATAAVALVEARQNAAQIQSLSEAIQNTNLAVNELKTAIGASATAIQAIQTQINEVINPAINRLSCEILDAQLASMLNLYLIHLTTVFQNQLTNPALTPLSIQSLQSLLQGTSSVLTNITSSSKLALNDALVTGLITGQVVGLNMTSLQIVIAAYVPSVAKLSNAVVHNFIRITTSVNGTEVIIQSPTIIMEQNEVMYDLKTGHCTESDLNIYCPYVDAQLLSPGMTNCINGRLNDCTFSKVVGSFPTRFAAVEGAILANCKYLQCNCLTPPYIITPLNGEMISMIDLSKCQRLDLGTIVFDINNPVNVTFNGNYRADVGQMIVTNPLDISAELNQINTSLSNAQGFLSKSDAWLHVSQWVTNSGTIFIILIIGLIVGIVYMIINTYVVVQIIKEINRMRTSDRAHLLKGSISSIST

SEQ ID NO: 23 - protein, 543 aa, Avian paramyxovirus 8
  MISC_FEATURE: fusion protein
MGQISVYLINSVLLLLVYPVNSIDNTLIAPIGVASANEWQLAAYTTSLSGTIAVRFLPVLPDNMTTCLRETITTYNNTVNNILGPLKSNLDALLSSETYPQTRLIGAVIGSIALGVATSAQITAAVALKQAQDNARNILALKEALSKTNEAVKELSSGLQQTAIALGKIQSFVNEEILPSINQLSCEVTANKLGVYLSLYLTELTTIFGAQLTNPALTSLSYQALYNLCGGNMAMLTQKIGIKQQDVNSLYEAGLITGQVIGYDSQYQLLVIQVNYPSISEVTGVRATELVTVSVTTDKGEGKAIVPQFVAESRVTIEELDVASCKFSSTTLYCRQVNTRALPPLVASCLRGNYDDCQYTTEIGALSSRYITLDGGVLVNCKSIVCRCLNPSKIISQNTNAAVTYVDATICKTIQLDDIQLQLEGSLSSVYARNISIEISQVTTSGSLDISSEIGNINNTVNRVEDLIHQSEEWLAKVNPHIVNNTTLIVLCVLSALAVIWLAVLTAIIIYLRTKLKTISALAVTNTIQSNPYVNQTKRESKF

SEQ ID NO: 24 - protein, 546 aa, Tailam virus
  MISC_FEATURE: fusion protein
MKLSVVYTTLLVSTFYSDLARSQLALSELTKIGVIPGRSYDLKISTQASYQYMVVKLIPNLTGLNNCTNGTIEAYKKMLNRLLSPIDAALRKMKDAVNDKPPESVGNVKFWGAVIGGVALGVATSAQITAGVALHNSIQNANAILALKDSIRQSNKAIQELQTAMSTTVVVLNALQDQINNQLVPAINSLGCQVVANTLGLKLNQYFSEISLVFGPNLRDPTSETLSIQALSRAFNGDFDSMLSKLKYDDSDFLDLLESDSIRGRIIDVSLSDYLITIQIEYPALLSIKDAVIQTFNLISYNTRGTEWISIFPKQLLVRGTYISNIDISQCVIAATSIICKSDTSTPISSATWSCATGNITNCARTRVVNAHVPRFALYGGVVFANCAPVVCKCQDPLYSINQEPKVTNVMVDVDACKEMYLDGLYITLGKTQISRAMYAEDVSLGGPISVDPIDLGNEINSINSAINRSEEHLNHANELLDKVNPRIVNVKTFGVMIGLLVLVVLWCVITLVWLICLTKQLARTAYAGSMGSRASTVNSLSGFVG

SEQ ID NO: 25 - protein, 557 aa, Porcine parainfluenza virus 1
  MISC_FEATURE: fusion protein
MQVTTLRPAIILSIALLVTGQVPRDKLANLGIIIKDSKALKIAGSYENRYIVLSLVPTIDNVNGCGSIQIAKYKEMLERLLIPIKDALDLQESLIVIDNETVNNNYSPQYRFVGAIIGTIALGVATAAQVTAGVALMEAREAKRDISMLKEAIEKTQNSIEKLQNSAGEQILALKMLQDYVNGEIKPAIEELGCETAALKLGIALTQHYTELTNAFGSNLGSIGEKSLTLQALSSLYKTNITNILTATNLGKTDIYDIIYAEQVKGRVIDVDLKRYMVTISVKIPILSEIPGVLIYEVSSISYNIDGAEWYAAVPDHILSKSAYIGGADISDCIESRLTYICPQDPAQIIADNQQQCFFGHLDKCPITKVIDNLVPKFAFINGGVVANCIASTCTCGEERIQVSQDRNKGVTFLTHNNCGLIGINGIEFHANKKGSDATWNVSPIGVGPAVSLRPVDISLQIVAATNFLNSSRKDLMKAKEILNQVGNLKDLTTITIINIVIIIILLICVIGLGILYHQLRSALGMRDKMSVLNNSSYSLEPRTAQVQVIKPTSFMG

SEQ ID NO: 26 - protein, 538 aa, Avian metapneumovirus
  MISC_FEATURE: F protein
MDVRICLLLFLISNPSSCIQETYNEESCSTVTRGYKSVLRTGWYTNVFNLEIGNVENITCNDGPSLIDTELVLTKNALRELKTVSADQVAKESRLSSPRRRRFVLGAIALGVATAAAVTAGVALAKTIRLEGEVKAIKNALRNTNEAVSTLGNGVRVLATAVNDLKEFISKKLTPAINQNKCNIADIKMAISFGQNNRRFLNVVRQFSDSAGITSAVSLDLMTDDELVRAINRMPTSSGQISLMLNNRAMVRRKGFGILIGVYDGTVVYMVQLPIFGVIETPCWRVVAAPLCRKRRGNYACILREDQGWYCTNAGSTAYYPNKDDCEVRDDYVFCDTAAGINVALEVDQCNYNISTSKYPCKVSTGRHPVSMVALTPLGGLVSCYESVSCSIGSNKVGIIKQLGKGCTHIPNNEADTITIDNTVYQLSKVVGEQRTIKGAPVVNNFNPILFPVDQFNVALDQVFESIDRSQDLIDKSNDLLGADAKSKAGIAIAIVVLVILGIFFLLAVIYYCSRVRKTKPKHDYPATTGHSSMAYVS

SEQ ID NO: 27 - protein, 545 aa, Avian paramyxovirus 13 goose/Kazakhstan/5751/2013
  MISC_FEATURE: fusion protein
MARFSWEIFRLSTILLIAQTCQGSIDGRLTLAAGIVPVGDRPISIYTSSQTGIIVVKLIPNLPDNKKDCAKQSLQSYNETLSRILTPLATAMSAIRGNSTTQVRENRLVGAIIGSVALGVATAAQITAATALIQANQNAANIARLANSIAKTNEAVTDLTEGLGTLAIGVGKLQDYVNEQFNNTAVAIDCLTLESRLGIQLSLYLTELMGVFGNQLTSPALTPITIQALYNLAGGNLNALLSRLGASETQLGSLINSGLIKGMPIMYDDANKLLAVQVELPSIGKLNGARSTLLETLAVDTTRGPSSPIIPSAVIEIGGAMEELDLSPCITTDLDMFCTKIISYPLSQSTLSCLNGNLSDCVFSRSEGVLSTPYMTIKGKIVANCKQVICRCMDPPQILSQNYGEALLLIDENTCRSLELSGVILKLAGTYESEYTRNLTVDPSQVIITGPLDISAELSKVNQSIDSAKENIAESNKFLSQVNVKLLSSSAMITYIVATVVCLIIAITGCVIGIYTLTKLKSQQKTLLWLGNNAEMHGSRSKTSF

SEQ ID NO: 28 - protein, 554 aa, Menangle virus
  MISC_FEATURE: fusion protein
MMPRVLGMIVLYLTHSQILCINRNTLYQIGLIHRSVKKVNFYSQGSPSYIVVKLVPTLAAIPPNCSIKSLQRYKETVTSLVQPISDNLGYLQDKLVTGQSRRRRRFAGVAIGLAALGVAAAAQATAAVALVETRENAGKIQALSESIQNTNQAVHSLKTALGFSATAIQAIQNQVNEVINPAINKLSCEVLDSQLASMLNLYLIHLTTVFQTQLTNPALTPLSIQALTSVLQGTSGVLMNSTNSTLTQPIDLLATGLITGQIISVNMTSLQLIIATFMPSIAELPNAVLHSFFRITTSVNLTEVMIQSPEFIMEQNGVFYDFNTAHCQLGDNNVYCPYIDAARLSSMMTNCINGNLGECVFSRVIGSFPSRFVSLNGAILANCKFMRCNCLSPEKIITPLDGEMISLIDLRVCQKLTLGTITFEISQPVNVSFQGGFVANAGQIIVTNPFDISAELGQINNSLNDAQGFLDQSNNWLKVSGWINNSGSLFIAGIVVIGLIVLCIVIIIYINVQIIREVNRLRSFIYRDYVLDHDKAPYSPESSSPHRKSLKTVS

SEQ ID NO: 29 - protein, 544 aa, Avian paramyxovirus 5
  MISC_FEATURE: fusion protein
MLQLPLTILLSILSAHQSLCLDNSKLIHAGIMSTTEREVNVYAQSITGSIVVRLIPNIPSNHKSCATSQIKLYNDTLTRLLTPIKANLEGLISAVSQDQSQNSGKRKKRFVGAVIGAAALGLATAAQVTATVALNQAQENARNILRLKNSIQKTNEAVMELKDAVGQTAVAIDKTQAFINNQILPAISNLSCEVLGNKIGVQLSLYLTELTTVFGNQLTNPALTTLSLQALYNLCGDDFNYLINLLNAKNRNLASLYEANLIQGRITQYDSMNQLLIIQVQIPSISTVSGMRVTELFTLSVDTPIGEGKALVPKYVLSSGRIMEEVDLSSCAITSTSVFCSSIISRPLPLETINCLNGNVTQCQFTANTGTLESRYAVIGGLVIANCKAIVCRCLNPPGVIAQNLGLPITIISSNTCQRINLEQITLSLGNSILSTYSANLSQVEMNLAPSNPLDISVELNRVNTSLSKVESLIKESNSILDSVNPQILNVKTVIILAVIIGLIVVWCFILTCLIVRGFMLLVKQQKFKGLSVQNNPYVSNNSH

SEQ ID NO: 30 - protein, 557 aa, Cedar virus
  MISC_FEATURE: fusion glycoprotein
MSNKRTTVLIIISYTLFYLNNAAIVGFDFDKLNKIGVVQGRVLNYKIKGDPMTKDLVLKFIPNIVNITECVREPLSRYNETVRRLLLPIHNMLGLYLNNTNAKMTGLMIAGVIMGGIAIGIATAAQITAGFALYEAKKNTENIQKLTDSIMKTQDSIDKLTDSVGTSILILNKLQTYINNQLVPNLELLSCRQNKIEFDLMLTKYLVDLMTVIGPNINNPVNKDMTIQSLSLLFDGNYDIMMSELGYTPQDFLDLIESKSITGQIIYVDMENLYVVIRTYLPTLIEVPDAQIYEFNKITMSSNGGEYLSTIPNFILIRGNYMSNIDVATCYMTKASVICNQDYSLPMSQNLRSCYQGETEYCPVEAVIASHSPRFALTNGVIFANCINTICRCQDNGKTITQNINQFVSMIDNSTCNDVMVDKFTIKVGKYMGRKDINNINIQIGPQIIIDKVDLSNEINKMNQSLKDSIFYLREAKRILDSVNISLISPSVQLFLIIISVLSFIILLIIIVYLYCKSKHSYKYNKFIDDPDYYNDYKRERINGKASKSNNIYYVGD

SEQ ID NO: 31 - protein, 546 aa, Rinderpest morbillivirus
  MISC_FEATURE: F protein
MGILFAALLAMTNPHLATGQIHWGNLSKIGVVGTGSASYKVMTQSSHQSLVIKLMPNVTAIDNCTKTEIMEYKRLLGTVLKPIREALNAITKNIKPIQSSTTSRRHKRFAGVVLAGAALGVATAAQITAGIALHQSMMNSQAIESLKASLETTNQAIEEIRQAGQEMVLAVQGVQDYINNELVPAMGQLSCEIVGQKLGLKLLRYYTEILSLFGPSLRDPVSAELSIQALSYALGGDINKILEKLGYSGSDLLAILESKGIKAKITYVDIESYFIVLSIAYPSLSEIKGVIVHRLESVSYNIGSQEWYTTVPRYVATQGYLISNFDDTPCAFTPEGTICSQNALYPMSPLLQECFRGSTRSCARTLVSGSIGNRFILSKGNLIANCASILCKCYTTGSIISQDPDKILTYIAADQCPVVEVGGVTIQVGSREYSDAVYLHEIDLGPPISLEKLDVGTNLWNAVTKLEKAKDLLDSSDLILENIKGVSVTNTGYILVGVGLIAVVGILIITCCCKKRRSDNKVSTMVLNPGLRPDLTGTSKSYVRSL

SEQ ID NO: 32 - protein, 536 aa, Avian paramyxovirus 10
  MISC_FEATURE: fusion protein
MTRTRLLFLLTCYIPGAVSLDNSILAPAGIISASERQIAIYTQTLQGTIALRFIPVLPQNLSSCAKDTLESYNSTVSNLLLPIAENLNALLKDADKPSQRIIGAIIGSVALGVATTAQVTAALAMTQAQQNARNIWKLKESIKNTNQAVLELKDGLQQSAIALDKVQSFINSEILPQINQLGCEVAANKLGIFLSLYLTEITTVFKNQITNPALSTLSYQALYNLCGGNMAALTKQIGIKDTEINSLYEAELITGQVIGYDSADQILLIQVSYPSVSRVQGVRAVELLTVSVATPKGEGKAIAPSFIAQSNIIAEELDTQPCKFSKTTLYCRQVNTRTLPVRVANCLKGKYNDCQYTTEIGALASRYVTITNGVVANCRSIICRCLDPEGIVAQNSDAAITVIDRSTCKLIQLGDITLRLEGKLSSSYSKNITIDISQVTTSGSLDISSELGSINNTITKVEDLISKSNDWLSKVNPTLISNDTIIALCVIAGIVVIWLVIITILSYYILIKLKNVALLSTMPKKDLNPYVNNTKF

SEQ ID NO: 33 - protein, 552 aa, Dolphin morbillivirus
  MISC_FEATURE: fusion protein
MAASNGGVMYQSFLTIIILVIMTEGQIHWGNLSKIGIVGTGSASYKVMTRPNHQYLVIKLMPNVTMIDNCTRTEVTEYRKLLKTVLEPVKNALTVITKNIKPIQSLTTSRRSKRFAGVVLAGVALGVATAAQITAGVALHQSIMNSQSIDNLRTSLEKSNQAIEEIRQASQETVLAVQGVQDFINNELIPSMHQLSCEMLGQKLGLKLLRYYTEILSIFGPSLRDPVSAEISIQALSYALGGDINKILEKLGYSGADLLAILESRGIKAKVTHVDLEGYFIVLSIAYPTLSEVKGVIVHKLEAVSYNLGSQEWYTTLPKYVATNGYLISNFDESSCAFMSEVTICSQNALYPMSPLLQQCLRGSTASCARSLVSGTIGNRFILSKGNLIANCASVLCKCYSTGTIISQDPDKLLTFVAADKCPLVEVDGITIQVGSREYPDSVYVSRIDLGPAISLEKLDVGTNLGSALTKLDNAKDLLDSSNQILENVRRSSFGGAMYIGILVCAGALVILCVLVYCCRRHCRKRVQTPPKATPGLKPDLTGTTKSYVRSL

SEQ ID NO: 34 - protein, 552 aa, Mossman virus
  MISC_FEATURE: fusion protein
MSNYFPARVIIIVSLITAVSCQISFQNLSTIGVFKFKEYDYRVSGDYNEQFLAIKMVPNVTGVENCTASLIDEYRHVIYNLLQPINTTLTASTSNVDPYAGNKKFFGAVIAGVALGVATAAQVTAGVALYEARQNAAAIAEIKESLHYTHKAIESLQISQKQTVVAIQGIQDQINTNIIPQINALTCEIANQRLRLMLLQYYTEMLSSFGPIIQDPLSGHITVQALSQAAGGNITGLMRELGYSSKDLRYILSVNGISANIIDADPEIGSIILRIRYPSMIKIPDVAVMELSYLAYHAAGGDWLTVGPRFILKRGYSLSNLDITSCTIGEDFLLCSKDVSSPMSLATQSCLRGDTQMCSRTAVQDREAPRFLLLQGNLIVNCMSVNCKCEDPEETITQDPAYPLMVLGSDTCKIHYIDGIRIKLGKVQLPPITVLNTLSLGPIVVLNPIDVSNQLSLVETTVKESEDHLKNAIGALRSQSRVGGVGIVAIVGLIIATVSLVVLVISGCCLVKYFSRTATLESSLTTIEHGPTLAPKSGPIIPTYINPVYRHD

SEQ ID NO: 35 - protein, 544 aa, J-virus
  MISC_FEATURE: fusion protein
MKPVALIYLTILAFTVKVRSQLALSDLTKIGIIPAKSYELKISTQAAQQLMVIKLIPNVNGLTNCTIPVMDSYKKMLDRILKPIDDALNHVKNAIQDKQGDGVPGVRFWGAIIGGVALGVATSAQITAGVALHNSIQNANAILQLKESIRNSNKAIEELQAGLQSTVLVINALQDQINSQLVPAINTLGCSVIANTLGLRLNQYFSEISLVFGPNLRDPTSQTLSIQAIAKAFNGDFDSMMKKMHYTDSDFLDLLESDSIRGRIISVSLEDYLIIIQIDYPGLTTIPNSVVQTFNLITYNYKGTEWESIFPRELLIRGSYISNIDISQCVGTSKSMICKSDTSTTISPATWACATGNLTSCARTRVVNSHSTRFALSGGVLFANCAPIACRCQDPQYSINQEPKTTNVMVTSEDCKELYIDGFYLTLGKKMLDRAMYAEDVALGGSVSVDPIDIGNELNSINESINKSHEYLDKANELLEQVNPNIVNVSSFSFILVISILLIIWFIVTLVWLIYLTKHMNFIVGKVAMGSRSSTVNSLSGFVG

SEQ ID NO: 36 - protein, 537 aa, Mapuera virus
  MISC_FEATURE: fusion protein
MRSSLFLVLTLLVPFAHSIDSITLEQYGTVITSVRSLAYFLETNPTYISVRLMPAIQTDSSHCSYHSIENYNLTLTKLLLPLQENLHQITDSLSSRRRKKRFAGVAVGLAALGVATAAQVTAAIAVVKAKENSAKIAQLTSAISETNRAVQDLIEGSKQLAVAVQAIQDQINNVIQPQLTNLSCQVADAQVGTILNMYLTELTTVFHPQITNSALTPITIQALRSLLGSTLPQVVTSTIKTDVPLQDLLTSGLLKGQIVYLDLQSMIMVVSVSVPTIALHSMAKVYTLKAISAHVNNAEVQMQVPSRVMELGSEIMGYDIDQCEETSRYLFCPYNGGSILSATMKMCLNGNISQCVFTPIYGSFLQRFVLVDGVIVANCRDMTCACKSPSKIITQPDSLPVTIIDSTSCSNLVLDTLELPIISINNATYRPVQYVGPNQIIFSQPLDLLSQLGKINSSLSDAIEHLAKSDEILEQIQWDSPQGYTLIALTSVLAFVVVAIVGLLISTRYLIFEIRRINTTLTQQLSSYVLSNKIIQY

SEQ ID NO: 37 - protein, 566 aa, Nariva virus
  MISC_FEATURE: fusion protein
MAEQEKTPLRYKILLIIIVINHYNITNVFGQIHLANLSSIGVFVTKTLDYRTTSDPTEQLLVINMLPNISNIQDCAQGVVNEYKHLISSLLTPINDTLDLITSNINPYSGRNKLFGEIIAGAALTVATSAQITAGVALYEARQNAKDIAAIKESLGYAYKAIDKLTTATREITVVINELQDQINNRLIPRINDLACEVWATRLQAMLLQYYAEIFSVIGPNLQDPLSGKISIQALARAAGGNIKLMVDELNYSGQDLSRLVKVGAIKGQIIDADPSLGVVIIKMRYPNIIKIPNVAISELSYVSYSSDGQDWITTGPNYIVTRGYSIANIQTSSCSVGDDFVLCDRDMTYPMSQVTQDCLRGNIALCSRMVVRDREAPRYLILQGNMVANCMSITCRCEEPESEIYQSPDQPLTLLTRDTCDTHVVDGIRIRLGVRKLPTISVINNITLGPIITTDPIDVSNQLNAVVSTIDQSAELLHQAQRVLSERARGARDHILATAAIVICVVLAVLILVLLIGLVYLYRTQNEILVKTTMLEQVPTFAPKSFPMESQIYSGKTNKGYDPAE

SEQ ID NO: 38 - protein, 662 aa, Bat paramyxovirus Eid_hel/GH-M74a/GHA/2009
  MISC_FEATURE: fusion protein
MKKKTDNPTISKRGHNHSRGIKSRALLRETDNYSNGLIVENLVRNCHHPSKNNLNYTKTQKRDSTIPYRVEERKGHYPKIKHLIDKSYKHIKRGKRRNGHNGNIITIILLLILILKTQMSEGAIHYETLSKIGLIKGITREYKVKGTPSSKDIVIKLIPNVTGLNKCTNISMENYKEQLDKILIPINNIIELYANSTKSAPGNARFAGVIIAGVALGVAAAAQITAGIALHEARQNAERINLLKDSISATNNAVAELQEATGGIVNVITGMQDYINTNLVPQIDKLQCSQIKTALDISLSQYYSEILTVFGPNLQNPVTTSMSIQAISQSFGGNIDLLLNLLGYTANDLLDLLESKSITGQITYINLEHYFMVIRVYYPIMTTISNAYVQELIKISFNVDGSEWVSLVPSYILIRNSYLSNIDISECLITKNSVICRHDFAMPMSYTLKECLTGDTEKCPREAVVTSYVPRFAISGGVIYANCLSTTCQCYQTGKVIAQDGSQTLMMIDNQTCSIVRIEEILISTGKYLGSQEYNTMHVSVGNPVFTDKLDITSQISNINQSIEQSKFYLDKSKAILDKINLNLIGSVPISILFIIAILSLILSIITFVIVMIIVRRYNKYTPLINSDPSSRRSTIQDVYIIPNPGEHSIRSAARSIDRDRD

SEQ ID NO: 39 - protein, 539 aa, Avian paramyxovirus 7
  MISC_FEATURE: fusion protein
MRVRPLIIILVLLVLLWLNILPVIGLDNSKIAQAGIISAQEYAVNVYSQSNEAYIALRTVPYIPPHNLSCFQDLINTYNTTIQNIFSPIQDQITSITSASTLPSSRFAGLVVGAIALGVATSAQITAAVALTKAQQNAQEIIRLRDSIQNTINAVNDITVGLSSIGVALSKVQNYLNDVINPALQNLSCQVSALNLGIQLNLYLTEITTIFGPQITNPSLTPLSIQALYTLAGDNLMQFLTRYGYGETSVSSILESGLISAQIVSFDKQTGIAILYVTLPSIATLSGSRVTKLMSVSVQTGVGEGSAIVPSYVIQQGTVIEEFIPDSCIFTRSDVYCTQLYSKLLPDSILQCLQGSMADCQFTRSLGSFANRFMTVAGGVIANCQTVLCRCYNPVMIIPQNNGIAVTLIDGSLCKELELEGIRLTMADPVFASYSRDLIINGNQFAPSDALDISSELGQLNNSISSATDNLQKAQESLNKSIIPAATSSWLIILLFVLVSISLVIGCISIYFIYKHSTTNRSRNLSSDIISNPYIQKAN

SEQ ID NO: 40 - protein, 539 aa, Tuhoko virus 2
  MISC_FEATURE: fusion protein
MAPCVLFLSSLLLISTISPSHGINQPALRRIGAIVSSVKQLKFYSKTKPNYIIVKLLPTINLSKSNCNLTSINRYKESVIEIIKPLADNIDNLNQKLLPKNRRKRMAGVAIGLAALGVAAAAQATAAVALVEARKNTQMIQSLADSIQDTNAAVQAVNIGLQNSAVAIQAIQNQINNVINPALDRLNCEVLDAQIASILNLYLIKSVTIFQNQLTNPALQQLSIQMLSIVMQDTAKILGNFTIGDKFDQHDLLGSGLITGQVVGVNLTNLQLIIAAFIPSIAPLPQAYIIDLISITISVNDTEAVIQIPERIMEHGSSIYQFGGKQCVYGQFSAYCPFSDAVLMTQDLQLCMKGNIEHCIFSSVLGSFPNRFASVDGVFYANCKYMSCACSDPLQVIHQDDSVNLMVIDSSVCRSLTLGHVTFPIIAFSNVSYQMKTNISIEQMIVTSPLDLSTELKQINNSVNIANTFLDSSNRALKTSIFGTSSQIILIVLLIFTCLLILYVIFLTYIIKILIKEVKRLRDGNSRTGSKLSFINPDV

SEQ ID NO: 41 - protein, 537 aa, Tuhoko viirus 3
  MISC_FEATURE: fusion protein
MLWLTILIALVGNHESTCMNINFLQSLGQINSQKRFLNFYTQQPPSYMVIRLVPTLQLSANNCTLGSIVRYRNAIKELIQPMDENLRWLSSNLIPQRRGKRFAGVAVGLAALGVAVAAQATAAVALVEARANAEKIASMSQSIQETNKAVTSLSQAVSASGIAIQAIQNEINNVIHPILNQVQCDVLDARVGNILNLYLIKVTTIFQNQLTNPALQRLSTQALSMLMQSTSSYLRNLSSSESAINADLSMTNLIEAQIVGINMTNLQLVLAVFIPSIARLNGALLYDFISITISSNQTEVMLQIPHRVLEIGNSLYTFEGTQCEMTKLNAYCLYSDAIPVTESLRDCMNGLFSQCGFVRIIGSFANRFASVNGVIYANCKHLTCSCLQPDEIITQDTNVPLTIIDTKRCTKISLGHLTFTIREYANVTYSLRTEIANSQITVVSPLDLSSQLTTINNSLADATNHIMNSDRILDRLNSGLYSKWVIIFLICASIVSLIGLVFLGFLIRGLILELRSKHRSNLNKASTYSIDSSIGLT

SEQ ID NO: 42 - protein, 545 aa, Mojiang virus
  MISC_FEATURE: fusion protein
MALNKNMFSSLFLGYLLVYATTVQSSIHYDSLSKVGVIKGLTYNYKIKGSPSTKLMVVKLIPNIDSVKNCTQKQYDEYKNLVRKALEPVKMAIDTMLNNVKSGNNKYRFAGAIMAGVALGVATAATVTAGIALHRSNENAQAIANMKSAIQNTNEAVKQLQLANKQTLAVIDTIRGEINNNIIPVINQLSCDTIGLSVGIRLTQYYSEIITAFGPALQNPVNTRITIQAISSVFNGNFDELLKIMGYTSGDLYEILHSELIRGNIIDVDVDAGYIALEIEFPNLTLVPNAVVQELMPISYNIDGDEWVTLVPRFVLTRTTLLSNIDTSRCTITDSSVICDNDYALPMSHELIGCLQGDTSKCAREKVVSSYVPKFALSDGLVYANCLNTICRCMDTDTPISQSLGATVSLLDNKRCSVYQVGDVLISVGSYLGDGEYNADNVELGPPIVIDKIDIGNQLAGINQTLQEAEDYIEKSEEFLKGVNPSIITLGSMVVLYIFMILIAIVSVIALVLSIKLTVKGNVVRQQFTYTQHVPSMENINYVSH

SEQ ID NO: 43 - protein, 546 aa, Avian paramyxovirus 12
  MISC_FEATURE: fusion protein
MAIPVPSSTALMIFNILVSLAPASALDGRLLLGAGIVPTGDRQVNVYTSSQTGIIALKLLPNLPKDKENCAEVSIRSYNETLTRILTPLAQSMAAIRGNSTVSTRGREPRLVGAIIGGVALGVATAAQITAATALIQANQNAENIARLAKGLAATNEAVTDLTKGVGSLAIGVGKLQDYVNEQFNRTGEAIECLTIESRVGVQLSLYLTEVIGVFGDQITSPALSDISIQALYNLAGGNLNVLLQKMGIEGTQLGSLINSGLIKGRPIMYDDGNKILGIQVTLPSVGRINGARATLLEAIAVATPKGNASPLIPRAVISVGSLVEELDMTPCVLTPTDIFCTRILSYPLSDSLTTCLKGNLSSCVFSRTEGALSTPYVSVHGKIVANCKSVVCRCVEPQQIISQNYGEALSLIDESLCRILELNGVILKMDGQFTSEYTKNITIDPVQVIISGPIDISSELSQVNQSLDSALENIKESNSYLSKVNVKLISSSAMITYIVITVICLILTFVALVLGIYSYTKIRSQQKTLIWMGNNIARSKEGNRF

SEQ ID NO: 44 - protein, 538 aa, Avian paramyxovirus 3
  MISC_FEATURE: fusion protein
  misc_feature (287)..(287): Xaa can be any naturally occurring amino acid
MASPMVPLLIITVVPALISSQSANIDKLIQAGIIMGSGKELHIYQESGSLDLYLRLLPVIPSNLSHCQSEVITQYNSTVTRLLSPIAKNLNHLLQPRPSGRLFGAVIGSIALGVATSAQISAAIALVRAQQNANDILALKAAIQSSNEAIKQLTYGQEKQLLAISKIQKAVNEQVIPALTALDCAVLGNKLAAQLNLYLIEMTTIFGDQINNPVLTPIPLSYLLRLTGSELNDVLLQQTRSSLSLIHLVSKGLLSGQIIGYDPSVQGIIIRIGLIRTQRIDRSLVFXPYVLPITISSNIATPIIPDCVVKKGVIIEGMLKSNCIELERDIICKTINTYQITKETRACLQGNITMCKYQQSRTQLSTPFITYNGVVIANCDLVSCRCIRPPMIITQVKGYPLTIINRNLCTELSVDNLILNIETNHNFSLNPTIIDSQSRLIATSPLEIDALIQDAQHHAAAALLKVEESNAHLLRVTGLGSSSWHIILILTLLVCTIAWLIGLSIYVCRIKNDDSTDKEPTTQSSNRGIGVGSIQYMT

SEQ ID NO: 45 - protein, 552 aa, Salem virus
  MISC_FEATURE: fusion protein
MNPLNQTLIAKVLGFLLLSSSFTVGQIGFENLTRIGVHQVKQYGYKLAHYNSHQLLLIRMIPTVNGTHNCTHQVITRYREMVREIITPIKGALDIMKKAVSPDLVGARIFGAIVAGAALGIATSAQITAGVALHRTKLNGQEISKLKEAVSLTNEAVEQLQYSQGKSILAIQGIQDFINFNVVPLLEEHTCGIAKLHLEMALMEYFQKLILVFGPNLRDPIGSTIGIQALATLFQNNMFEVSLRLGYAGDDLEDVLQSNSIRANIIEAEPDSGFIVLAIRYPTLTLVEDQVITELAHITFNDGPQEWVATIPQFVTYRGLVLANIDVSTCTFTERNVICARDQTYPMIIDLQLCMRGNIAKCGRTRVTGSTASRFLLKDGNMYANCIATMCRCMSSSSIINQEPSHLTTLIVKETCSEVMIDTIRITLGERKHPPIDYQTTITLGQPIALAPLDVGTELANAVSYLNKSKVLLEHSNEVLSSVSTAHTSLTATIVLGIVVGGLAILIVVMFLFLEAQVIKVQRAMMLCPITNHGYLPNEDLLTRGHSIPTIG

SEQ ID NO: 46 - protein, 551 aa, Avian paramyxovirus 9
  MISC_FEATURE: fusion protein
MGYFHLLLILTAIAISAHLCYTTTLDGRKLLGAGIVITEEKQVRVYTAAQSGTIVLRSFRVVSLDRYSCMESTIESYNKTVYNILAPLGDAIRRIQASGVSVERIREGRIFGAILGGVALGVATAAQITAAIALIQANENAKNILRIKDSITKTNEAVRDVTNGVSQLTIAVGKLQDFVNKEFNKTTEAINCVQAAQQLGVELSLYLTEITTVFGPQITSPALSKLTIQALYNLAGVSLDVLLGRLGADNSQLSSLVSSGLITGQPILYDSESQILALQVSLPSISDLRGVRATYLDTLAVNTAAGLASAMIPKVVIQSNNIVEELDTTACIAAEADLYCTRITTFPIASAVSACILGDVSQCLYSKTNGVLTTPYVAVKGKIVANCKHVTCRCVDPTSIISQNYGEAATLIDDQLCKVINLDGVSIQLSGTFESTYVRNVSISANKVIVSSSIDISNELENVNSSLSSALEKLDESDAALSKVNVHLTSTSAMATYIVLTVIALILGFVGLGLGCFAMIKVKSQAKTLLWLGAHADRSYILQSKPAQSST

SEQ ID NO: 47 - protein, 533 aa, Achimota virus 1
  MISC_FEATURE: fusion protein
MWIMIILSLFQIIPGVTPINSKVLTQLGVITKHTRQLKFYSHSTPSYLVVKLVPTINTESTVCNFTSLSRYKDSVRELITPLAKNIDNLNSILTIPKRRKRMAGVVIGLAALGVAAAAQATAAVALIEAKKNTEQIQALSESIQNTNKAVSSIEKGLSSAAIAVQAIQNQINNVINPALTALDCGVTDAQLGNILNLYLIKTLTVFQKQITNPALQPLSIQALNIIMQETSSVLRNFTKTDEIEHTDLLTSGLITGQVVGVNLTNLQLIIAAFIPSIAPLNQAYILDFIRITVNINNSESMIQIPERIMEHGISLYQFGGDQCTFSDWSAYCPYSDATLMAPGLQNCFRGQAADCVFSTVMGSFPNRFVSVQGVFYVNCKFIRCACTQPQRLITQDDSLSLTQIDAKTCRMLTLGFVQFSINEYANVTYSFKNNVTAGQLIMTNPIDLSTEIKQMNDSVDEAARYIEKSNAALNKLMYGGRSDIVTTVLLVGFILLVVYVIFVTYILKILMKEVARLRNSNHPDLIKPYNYPM

SEQ ID NO: 48 - protein, 531 aa, Achimota virus 2
  MISC_FEATURE: fusion protein
MLNSFYQIICLAVCLTTYTVISIDQHNLLKAGVIVKSIKGLNFYSRGQANYIIVKLIPNVNVTDTDCDIGSIKRYNETVYSLIKPLADNIDYLRTQFAPTKRKKRFAGVAIGLTALGVATAAQVTAAVALVKAQENARKLDALADSIQATNEAVQDLSTGLQAGAIAIQAIQSEINHVINPALERLSCEIIDTRVASILNLYLIRLTTVFHRQLVNPALTPLSIQALNHLLQGETEGLVKNESKMTDSKIDLLMSGLITGQVVGVNIKHMQLMIAVFVPTTAQLPNAYVINLLTITANINNSEVLVQLPNQILERSGIIYQFRGKDCVSSPNHMYCPYSDASILSPELQLCLQGRLEMCLFTQVVGSFPTRFASDKGIVYANCRHLQCACSEPEGIIYQDDTSAITQIDASKCSTLKLDMLTFKLSTYANKTFDASFSVGKDQMLVTNLLDLSAELKTMNASVAHANKLIDKSNLLIQSNALIGHSNTIFIVVIVILAVMVLYLIIVTYIIKVIMVEVSRLKRMNIYSIDK

SEQ ID NO: 49 - protein, 532 aa, Tuhoko virus 1
  MISC_FEATURE: fusion protein
MVTIIKPLILLVTVILQISGHIDTTALTSIGAVIASSKEIMYYAQSTPNYIVIKLIPNLPNIPSQCNFSSIAYYNKTLLDLFTPISDNINMLHQRLSNTGRNRRFAGVAIGLAALGVATAAQVTAAFALVEAKSNTAKIAQIGQAIQNTNAAINSLNAGIGGAVTAIQAIQTQINGIITDQINAATCTALDAQIGTLLNMYLLQLTTTFQPQIQNPALQPLSIQALHRIMQGTSIVLSNLTDSSKYGLNDALSAGLITGQIVSVDLRLMQITIAANVPTLSRLENAIAHDIMRITTNVNNTEVIVQLPETIMEHAGRLYQFNKDHCLSSTQRFFCPYSDAKLLTSKISSCLSGIRGDCIFSPVVGNFATRFISVKGVIIANCKFIRCTCLQPEGIISQLDDHTLTVIDLKLCNKLDLGLIQFDLQVLSNISYEMTLNTSQNQLILTDPLDLSSELQTMNQSINNAANFIEKSNSLLNSSTYEFNRSVALLVALILLSLTILYVIVLTCVVKLLVHEVSKNRRHIQDLESHHK

SEQ ID NO: 50 - protein, 631 aa, Phpcine distemper virus
  MISC_FEATURE: fusion protein
MTRVKKLPVPTNPPMHHSLDSPFLNPEHATGKISITDDTSSQLTNFLYHKYHKTTINHLSRTISGTDPPSAKLNKFGSPILSTYQIRSALWWIAMVILVHCVMGQIHWTNLSTIGIIGTDSSHYKIMTRSSHQYLVLKLMPNVSIIDNCTKAELDEYEKLLNSVLEPINQALTLMTKNVKSLQSLGSGRRQRRFAGVVIAGAALGVATAAQITAGVALYQSNLNAQAIQSLRASLEQSNKAIDEVRQASQNIIIAVQGVQDYVNNEIVPALQHMSCELIGQRLGLKLLRYYTELLSVFGPSLRDPVSAEISIQALSYALGGEIHKILEKLGYSGNDMVAILETKGIRAKITHVDLSGKFIVLSISYPTLSEVKGVVVHRLEAVSYNIGSQEWYTTVPRYVATNGYLISNFDESSCVFVSESAICSQNSLYPMSPILQQCLRGETASCARTLVSGTLGNKFILSKGNIIANCASILCKCHSTSKIINQSPDKLLTFIASDTCSLVEIDGVTIQVGSRQYPDVVYASKVILGPAISLERLDVGTNLGSALKKLNDAKVLIESSDQILDTVKNSYLSLGTLIALPVSIGLGLILLLLICCCKKRYQHLFSQSTKVAPVFKPDLTGTSKSYVRSL

SEQ ID NO: 51 - protein, 541 aa, Caprine parainfluenza virus
  MISC_FEATURE: fusion protein
MIKKIICIFSMPILLSFCQVDIIKLQRVGILVSKPKSIKISQNFETRYLVLNLIPNIENAQSCGDQQIKQYKKLLDRLIIPLYDGLRLQQDIIVVDNNLKNNTNHRAKRFFGEIIGTIALGVATSAQITAAVALVEAKQARSDIERVKNAVRDTNKAVQSIQGSVGNLIVAVKSVQDYVNNEIVPSIKRLGCEAAGLQLGIALTQHYSELTNIFGDNIGTLKEKGIKLQGIASLYHTNITEIFTTSTVDQYDIYDLLFTESIKMRVIDVDLNDYSITLQVRLPLLTKISDAQIYNVDSVSYNIGGTEWYIPLPRNIMTKGAFLGGANLQDCIESFSDYICPSDPGFILNRDIENCLSGNITQCPKTLVISDIVPRYAFVDGGVIANCLSTTCTCNGIDNRINQAPDQGIKIITYKDCQTIGINGMLFKTNQEGTLAAYTPVDITLNNSVNLDPIDLSIELNRARSDLAESKEWIKRSEAKLDSVGSWYQSSTTEIIQIVMIIVLFIINIIVLIVLIKYSRSQNQSMNNHMNEPYILTNKVQ

SEQ ID NO: 52 - protein, 553 aa, Tupaia paramyxovirus
  MISC_FEATURE: fusion protein
MASLLKTICYIYLITYAKLEPTPKSQLDLDSLASIGVVDAGKYNYKLMTTGSEKLMVIKLVPNITYATNCNLTAHTAYTKMIERLLTPINQSLYEMRSVITERDGGTIFWGAIIAGAALGVATAAAITAGVALHRAEQNARNIAALKDALRNSNEAIQHLKDAQGHTVLAIQGLQEQINNNIIPKLKESHCLGVNNQLGLLLNQYYSEILTVFGPNLQNPVSASLTIQAIAKAFNGDFNSLMTNLNYDPTDLLDILESNSINGRIIDVNLNEKYIALSIEIPNFITLTDAKIQTFNRITYGYGSNEWLTLIPDNILEYGNLISNVDLTSCVKTKSSYICNQDTSYPISSELTRCLRGDTSSCPRTPVVNSRAPTFALSGGHIYANCAKAACRCEKPPMAIVQPATSTLTFLTEKECQEVVIDQINIQLAPNRLNKTIITDGIDLGPEVIINPIDVSAELGNIELEMDKTQKALDRSNKILDSMITEVTPDKLLIAMIVVFGILLLWLFGVSYYAFKIWSKLHFLDSYVYSLRNPSHHRSNGHQNHSFSTDISG

SEQ ID NO: 53 - protein, 543 aa, Avian paramyxovirus 3
  MISC_FEATURE: fusion protein
MQPGSALHLPHLYIIIALVSDGTLGQTAKIDRLIQAGIVLGSGKELHISQDSGTLDLFVRLLPVLPSNLSHCQLEAITQYNKTVTRLLAPIGKNLEQVLQARPRGRLFGPIIGSIALGVATSAQITAAIALVRAQQNANDILALKNALQSSNEAIRQLTYGQDKQLLAISKIQKAVNEQILPALDQLDCAVLGTKLAVQLNLYLIEMTTIFGEQINNPVLATIPLSYILRLTGAELNNVLMKQARSSLSLVQLVSKGLLSGQVIGYDPSVQGLIIRVNLMRTQKIDRALVYQPYVLPITLNSNIVTPIAPECVIQKGTIIEGMSRKDCTELEQDIICRTVTTYTLARDTRLCLQGNISSCRYQQSGTQLHTPFITYNGAVIANCDLVSCRCLRPPMIITQVKGYPLTIITRSVCQELSVDNLVLNIETHHNFSLNPTIIDPLTRVIATTPLEIDSLIQEAQDHANAALAKVEESDKYLRAVTGGNYSNWYIVLVIVLLFGNLGWSLLLTVLLCRSRKQQRRYQQDDSVGSERGVGVGTIQYMS

SEQ ID NO: 54 - protein, 541 aa, Avian paramyxovirus 14
  MISC_FEATURE: fusion protein
MEKGTVLFLAALTLYNVKALDNTKLLGAGIASGKEHELKIYQSSVNGYIAVKLIPFLPSTKRECYNEQLKNYNATINRLMGPINDNIKLVLSGVKTRTREGKLIGAIIGTAALGLATAAQVTAAIALEQAQDNARAILTLKESIRNTNNAVSELKTGLSEVSIALSKTQDYINTQIMPALSNLSCEIVGLKIGIQLSQYLTEVTAVFGNQITNPALQPLSMQALYQLCGGDFSLLLDKIGADRNELESLYEANLVTGRIVQYDTADQLVIIQVSIPSVSTLSGYRVTELQSISVDMDHGEGKAVIPRYIVTSGRVIEEMDISPCVLTATAVYCNRLLTTSLPESVLKCLDGDHSSCTYTSNSGVLETRYIAFDGMLIANCRSIVCKCLDPPYIIPQNKGKPLTIISKEVCKKVTLDGITLLIDAEFTGEYGLNITIGPDQFAPSGALDISTELGKLNNSINKAEDYIDKSNELLNRVNVDIVNDTAVIVLCVMSALVVVWCIGLTVGLIYVSKNTLRAVAIKGTSIENPYVSSGKHAKNSS

SEQ ID NO: 55 - protein, 551 aa, Avian paramyxovirus UPO216
  MISC_FEATURE: fusion protein
MIFTMYHVTVLLLLSLLTLPLGIQLARASIDGRQLAAAGIVVTGEKAINLYTSSQTGTIVVKLLPNVPQGREACMRDPLTSYNKTLTSLLSPLGEAIRRIHESTTETAGLVQARLVGAIIGSVALGVATSAQITAAAALIQANKNAENILKLKQSIAATNEAVHEVTDGLSQLAVAVGKMQDFINTQFNNTAQEIDCIRISQQLGVELNLYLTELTTVFGPQITSPALSPLSIQALYNLAGGNLDVLLSKIGVGNNQLSALISSGLISGSPILYDSQTQLLGIQVTLPSVSSLNNMRAIFLETLSVSTDKGFAAALIPKVVTTVGTVTEELDTSYCIETDIDLFCTRIVTFPMSPGIYACLNGNTSECMYSKTQGALTTPYMSVKGSIVANCKMTTCRCADPASIISQNYGEAVSLIDSSVCRVITLDGVTLRLSGSFDSTYQKNITIRDSQVIITGSLDISTELGNVNNSINNALDKIEESNQILESVNVSLTSTNALIVYIICTALALICGITGLILSCYIMYKMRSQQKTLMWLGNNTLDQMRAQTKM

SEQ ID NO: 56 - protein, 552 aa, Atlantic salmon paramyxovirus
  MISC_FEATURE: fusion protein
MDGPKFRFVLLILLTAPARGQVDYDKLLKVGIFEKGTANLKISVSSQQRYMVIKMMPNLGPMNQCGIKEVNLYKESILRLITPISTTLNYIKSEIQVEREVALQPNGTIVRFFGLIVAAGALTLATSAQITAGIALHNSLENAKAIKGLTDAIKESNLAIQKIQDATAGTVIALNALQDQVNTNIIPAINTLGCTAAGNTLGIALTRYYSELIMIFGPSLGNPVEAPLTIQALAGAFNGDLHGMIREYGYTPSDIEDILRTNSVTGRVIDVDLVGMNIVLEINLPTLYTLRDTKIVNLGKITYNVDGSEWQTLVPEWLAIRNTLMGGVDLSRCVVSSRDLICKQDPVFSLDTSIISCLNGNTESCPRNRVVNSVAPRYAVIRGNILANCISTTCLCGDPGVPIIQKGDNTLTAMSINDCKLVGVDGYVFRPGPKAVNVTFNLPHLNLGPEVNVNPVDISGALGKVEQDLASSRDHLAKSEKILSGINPNIINTEMVLVAVILSLVCAMVVIGIVCWLSILTKWVRSCRADCRRPNKGPDLGPIMSSQDNLSF

SEQ ID NO: 57 - protein, 546 aa, Nipah virus
  MISC_FEATURE: fusion glycoprotein F0
MVVILDKRCYCNLLILILMISECSVGILHYEKLSKIGLVKGVTRKYKIKSNPLTKDIVIKMIPNVSNMSQCTGSVMENYKTRLNGILTPIKGALEIYKNNTHDLVGDVRLAGVIMAGVAIGIATAAQITAGVALYEAMKNADNINKLKSSIESTNEAVVKLQETAEKTVYVLTALQDYINTNLVPTIDKISCKQTELSLDLALSKYLSDLLFVFGPNLQDPVSNSMTIQAISQAFGGNYETLLRTLGYATEDFDDLLESDSITGQIIYVDLSSYYIIVRVYFPILTEIQQAYIQELLPVSFNNDNSEWISIVPNFILVRNTLISNIEIGFCLITKRSVICNQDYATPMTNNMRECLTGSTEKCPRELVVSSHVPRFALSNGVLFANCISVTCQCQTTGRAISQSGEQTLLMIDNTTCPTAVLGNVIISLGKYLGSVNYNSEGIAIGPPVFTDKVDISSQISSMNQSLQQSKDYIKEAQRLLDTVNPSLISMLSMIILYVLSIASLCIGLITFISFIIVEKKRNTYSRLEDRRVRPTSSGDLYYIGT

SEQ ID NO: 58 - protein, 321 aa, Human respiratory syncytial virus
  MISC_FEATURE: attachment glycoprotein
MSKTKDQRTAKTLERTWDTLNHLLFISSCLYKLNLKSIAQITLSILAMIISTSLIIAAIIFIASANHKVTLTTAIIQDATNQIKNTTPTYLTQNPQLGISFSNLSGTTLQSTTILASTTPSAESTPQSTTVKIINTTTTQILPSKPTTKQRQNKPQNKPNNDFHFEVFNFVPCSICSNNPTCWAICKRIPNKKPGKKTTTKPTKKPTLKTTKKDPKPQTTKPKEALTTKPTGKPTINTTKTNIRTTLLTSNTKGNPEHTSQEETLHSTTSEGYLSPSQVYTTSGQEETLHSTTSEGYLSPSQVYTTSEYLSQSLSSSNTTK

SEQ ID NO: 59 - protein, 616 aa, Newcastle disease virus
  MISC_FEATURE: hemagglutinin-neuraminidase protein
MERGVSQVALENDEREAKNTWRLVFRVTVLFLTIVTLAISAAALAFSMNASTPQDLEGIPVAISKVEDKITSALGASQDVMDRIYKQVALESPLALLNTESTIMNALTSLSYQINGAANASGCGAPVPDPDYIGGIGKELIVDDTSDVTSFYPSAFQEHLNFIPAPTTGSGCTRIPSFDMSATHYCYTHNVILSGCRDHSHSHQYLALGVLRTSATGRVFFSTLRSINLDDTQNRKSCSVSATPLGCDMLCSKVTETEEEDYQSTDPTLMVHGRLGFDGQYHERDLDVHTLFGDWVANYPGVGGGSFINNRVWFPVYGGLKPGSPTDKRQEGQYAIYKRYNDTCPDDQEYQVRMAKSAYKPNRFGGKRVQQAILSIGVSTTLADDPVLTVTSNTITLMGAEGRVMTVGTSHYLYQRGSSYYSPAILYPLTIANKTATLQDPYKFNAFTRPGSVPCQASARCPNSCVTGVYTDPYPIVFHKNHTLRGVFGTMLDDEQARLNPVSAVFDSIARSRVTRVSSSSTKAAYTTSTCFKVVKTGKVYCLSIAEISNTLFGEFRIVPLLVEILRDEGRSEARSALTTQGHPGWNDEVVDPIFCAVTNQTDHRQKLEEYAQSWP

SEQ ID NO: 60 - protein, 316 aa, Human respiratory syncytial virus
  MISC_FEATURE: receptor binding glycoprotein
MSKNKNQRTARTLEKTWDTLNHLIVISSCLYKLNLKSIAQIALSVLAMIISTSLIIAAIIFIISANHKVTLTTVTVQTIKNHTEKNITTYLTQVSPERVSPSKQPTTTPPIHTNSATISPNTKSETHHTTAQTKGRTTTPTQNNKPSTKPRPKNPPKKPKDDYHFEVFNFVPCSICGNNQLCKSICKTIPNNKPKKKPTTKPTNKPPTKTTNKRDPKTPAKTLKKETTINPTTKKPTPKTTERDTSTPQSTVLDTTTSKHTERDTSTPQSTVLDTTTSKHTIQQQSLHSITPENTPNSTQTPTASEPSTSNSTQKL

SEQ ID NO: 61 - protein, 621 aa, Measels virus
  MISC_FEATURE: Hemagglutinin
MSPHRDRINAFYRDNPHPKGSRIVINREHLMIDRPYVLLAVLFVMFLSLIGLLAIAGIRLHRAAIYTAEIHKSLSTNLDVTNSIEHQVKDVLTPLFKIIGDEVGLRTPQRFTDLVKFISDKIKFLNPDREYDFRDLTWCINPPERIKLDYDQYCADVAAEELMNALVNSTLLEARATNQFLAVSKGNCSGPTTIRGQFSNMSLSLLDLYLSRGYNVSSIVTMTSQGMYGGTYLVGKPNLSSKGSELSQLSMHRVFEVGVIRNPGLGAPVFHMTNYFEQPVSNDFSNCMVALGELRFAALCHREDSVTVPYQGSGKGVSFQLVKLGVWKSPTDMQSWVPLSTDDPVIDRLYLSSHRGVIADNQAKWAVPTTRTDDKLRMETCFQQACKGKNQALCENPEWAPLKDNRIPSYGVLSVNLSLTVELKIKIASGFGPLITHGSGMDLYKTNHDNVYWLTIPPMKNLALGVINTLEWIPRFKVSPNLFTVPIKEAGEDCHAPTYLPAEVDGDVKLSSNLVILPGQDLQYVLATYDTSRVEHAVVYYVYSPSRSFSYFYPFRLPIKGVPIELQVECFTWDQKLWCRHFCVLADSESGGHITHSGMVGMGVSCTVTREDGTNRRQGCQ

SEQ ID NO: 62 - protein, 582 aa, Mumps virus
  MISC_FEATURE: hemagglutinin neuraminidase
MEPSKLFTMSDNATFAPGPVINAADKKTFRTCFRILVLSVQAVTLILVIVTLGELVRMINDQGLSNQLSSIADKIRESATMIASAVGVMNQVIHGVTVSLPLQIEGNQNQLLSTLATICTGKKQVSNCSTNIPLVNDLRFINGINKFIIEDYATHDFSIGHPLNMPSFIPTATSPNGCTRIPSFSLGKTHWCYTHNVINANCKDHTSSNQYISMGILVQTASGYPMFKTLKIQYLSDGLNRKSCSIATVPDGCAMYCYVSTQLETDDYAGSSPPTQKLTLLFYNDTVTERTISPTGLEGNWATLVPGVGSGIYFENKLIFPAYGGVLPNSSLGVKSAREFFRPVNPYNPCSGPQQDLDQRALRSYFPSYFSNRRVQSAFLVCAWNQILVTNCELVVPSNNQTLMGAEGRVLLINNRLLYYQRSTSWWPYELLYEISFTFTNSGQSSVNMSWIPIYSFTRPGSGNCSGENVCPTACVSGVYLDPWPLTPYSHQSGINRNFYFTGALLNSSTTRVNPTLYVSALNNLKVLAPYGNQGLFASYTTTTCFQDTGDASVYCVYIMELASNIVGEFQILPVLTRLTIT

SEQ ID NO: 63 - protein, 572 aa, Human respirovirus 3
  MISC_FEATURE: hemagglutinin neuraminidase
MEYWKHTNHGKDAGNELETATATHGNRLTNKITYILWTITLVLLSIVFIIVLINSIKSEKAHESLLQDINNEFMEVTEKIQVASDNTNDLIQSGVNTRLLTIQSHVQNYIPISLTQQISDLRKFISEITIRNDNQEVPPQRITHDVGIKPLNPDDFWRCTSGLPSLMRTPKIRLMPGPGLLAMPTTVDGCVRTPSLVINDLIYAYTSNLITRGCQDIGKSYQVLQIGIITVNSDLVPDLNPRISHTFNINDNRKSCSLALLNTDVYQLCSTPKVDERSDYASSGIEDIVLDIVNYDGSISTTRFKNNNISFDQPYAALYPSVGPGIYYKGKIIFLGYGGLEHPINENAICNTTGCPGKTQRDCNQASHSPWFSDRRMVNSIIVVDKGLNSVPKLKVWTISMRQNYWGSEGRLLLLGNKIYIYTRSTSWHSKLQLGIIDITDYSDIRIKWTWHNVLSRPGNNECPWGHSCPDGCITGVYTDAYPLNPTGSIVSSVILDSQKSRVNPVITYSTATERVNELAIRNKTLSAGYTTTSCITHYNKGYCFHIVEINHKSLNTFQPMLFKTEIPKSCS

SEQ ID NO: 64 - protein, 220 aa, Human metapneumovirus
  MISC_FEATURE: attachment glycoprotein G
MEVKVENIRAIDMLKARVKNRVARSKCFKNASLILIGITTLSIALNIYLIINYTIQKTTSESEHHTSSPPTESNKETSTIPIDNPDITPNSQHPTQQSTESLTLYPASSMSPSETEPASTPGITNRLSLADRSTTQPSESRTKTNSTVHKKNKKNISSTISRTQSPPRTTAKAVSRTTALRMSSTGERPTTTSVQSDSSTTAQNHEETGPANPQASVSTM

SEQ ID NO: 65 - protein, 607 aa, Canine distemper virus
  MISC_FEATURE: hemagglutinin
MLSYQDKVGAFYKDNARANSSKLSLVTEEQGGRRPPYLLFVLLILLVGILALLAIAGVRFRQVSTSNVEFGRLLKDDLEKSEAVHHQVMDVLTPLFKIIGDEIGLRLPQKLNEIKQFILQKTNFFNPNREFDFRDLHWCINPPSKIKVNFTNYCDAIGVRKSIASAANPILLSALSGGRGDIFPPYRCSGATTSVGRVFPLSVSLSMSLISKTSEIISMLTAISDGVYGKTYLLVPDYIEREFDTQKIRVFEIGFIKRWLNDMPLLQTTNYMVLPENSKAKVCTIAVGELTLASLCVDESTVLLYHDSNGSQDSILVVTLGIFGATPMNQVEEVIPVAHPSVERIHITNHRGFIKDSVATWMVPALVSEQQEGQKNCLESACQRKSYPMCNQTSWEPFGGVQLPSYGRLTLPLDASIDLQLNISFTYGPVILNGDGMDYYENPLLDSGWLTIPPKNGTILGLINKASRGDQFTVTPHVLTFAPRESSGNCYLPIQTSQIMDKDVLTESNLVVLPTQNFRYVVATYDISRENHAIVYYVYDPIRTISYTYPFRLTTKGRPDFLRIECFVWDDDLWCHQFYRFESDITNSTTSVEDLVRIRFSCNRSKP

SEQ ID NO: 66 - protein, 609 aa, Peste-des-petits-ruminants virus
  MISC_FEATURE: hemagglutinin
MSAQRERINAFYKDNPHNKNHRVILDRERLVIERPYILLGVLLVMFLSLIGLLAIAGIRLHRATVGTSEIQSRLNTNIELTESIDHQTKDVLTPLFKIIGDEVGIRIPQKFSDLVKFISDKIKFLNPDREYDFRDLRWCMNPPERVKINFDQFCEYKAAVKSIEHIFESPLNKSKKLQSLTLGPGTGCLGRTVTRAHFSELTLTLMDLDLEMKHNVSSVFTVVEEGLFGRTYTVWRSDARDPSTDLGIGHFLRVFEIGLVRDLGLGPPVFHMTNYLTVNMSDDYRRCLLAVGELKLTALCSSSETVTLGERGVPKREPLVVVILNLAGPTLGGELYSVLPTSDLMVEKLYLSSHRGIIKDDEANWVVPSTDVRDLQNKGECLVEACKTRPPSFCNGTGSGPWSEGRIPAYGVIRVSLDLASDPGVVITSVFGPLIPHLSGMDLYNNPFSRAVWLAVPPYEQSFLGMINTIGFPNRAEVMPHILTTEIRGPRGRCHVPIELSRRVDDDIKIGSNMVILPTIDLRYITATYDVSRSEHAIVYYIYDTGRSSSYFYPVRLNFKGNPLSLRIECFPWRHKVWCYHDCLIYNTITDEEVHTRGLTGIEVTCNPV

SEQ ID NO: 67 - protein, 575 aa, Sendai virus
  MISC_FEATURE: hemagglutinin neuraminidase protein
MDGDRSKRDSYWSTSPGGSTTKLVSDSERSGKVDTWLLILAFTQWALSIATVIICIVIAARQGYSMERYSMTVEALNTSNKEVKESLTSLIRQEVITRAANIQSSVQTGIPVLLNKNSRDVIRLIEKSCNRQELTQLCDSTIAVHHAEGIAPLEPHSFWRCPAGEPYLSSDPEVSLLPGPSLLSGSTTISGCVRLPSLSIGEAIYAYSSNLITQGCADIGKSYQVLQLGYISLNSDMFPDLNPVVSHTYDINDNRKSCSVVATGTRGYQLCSMPIVDERTDYSSDGIEDLVLDILDLKGRTKSHRYSNSEIDLDHPFSALYPSVGSGIATEGSLIFLGYGGLTTPLQGDTKCRIQGCQQVSQDTCNEALKITWLGGKQVVSVLIQVNDYLSERPRIRVTTIPITQNYLGAEGRLLKLGDQVYIYTRSSGWHSQLQIGVLDVSHPLTISWTPHEALSRPGNEDCNWYNTCPKECISGVYTDAYPLSPDAANVATVTLYANTSRVNPTIMYSNTTNIINMLRIKDVQLEAAYTTTSCITHFGKGYCFHIIEINQKSLNTLQPMLFKTSIPKLCKAES

SEQ ID NO: 68 - protein, 575 aa, Human parainfluenza virus 1 strain Washington/1964
  MISC_FEATURE: HN glycoprotein
MAEKGKTNSSYWSTTRNDNSTVNTHINTPAGRTHIWLLIATTMHTVLSFIIMILCIDLIIKQDTCMKTNIMTVSSMNESAKIIKETITELIRQEVISRTINIQSSVQSGIPILLNKQSRDLTQLIEKSCNRQELAQICENTIAIHHADGISPLDPHDFWRCPVGEPLLSNNPNISLLPGPSLLSGSTTISGCVRLPSLSIGDAIYAYSSNLITQGCADIGKSYQVLQLGYISLNSDMYPDLNPVISHTYDINDNRKSCSVIAAGTRGYQLCSLPTVNETTDYSSEGIEDLVFDILDLKGKTKSHRYKNEDITFDHPFSAMYPSVGSGIKIENTLIFLGYGGLTTPLQGDTKCVINRCTNVNQSVCNDALKITWLKKRQVVNVLIRINNYLSDRPKIVVETIPITQNYLGAEGRLLKLGKKIYIYTRSSGWHSNLQIGSLDINNPMTIKWAPHEVLSRPGNQDCNWYNRCPRECISGVYTDAYPLSPDAVNVATTTLYANTSRVNPTIMYSNTSEIINMLRLKNVQLEAAYTTTSCITHFGKGYCFHIVEINQASLNTLQPMLFKTSIPKICKITS

SEQ ID NO: 69 - protein, 240 aa, Human metapneumovirus
  MISC_FEATURE: attachment glycoprotein G
MEVRVENIRAIDMFKAKMKNRIRSSKCYRNATLILIGLTALSMALNIFLIIDYATLKNMTKVEHCVNMPPVEPSKKSPMTSAADLNTKLNPQQATQLTTEDSTSLAATSENHLHTETTPTSDATISQQATDEHTTLLRPINRQTTQTTTEKKPTGATTKKDKEKETTTRTTSTAATQTLNTTNQTSNGREATTTSARSRNGATTQNSDQTIQAADPSSKPYHTQTNTTTAHNTDTSSLSS

SEQ ID NO: 70 - protein, 604 aa, Hendra virus
  MISC_FEATURE: glycoprotein
MMADSKLVSLNNNLSGKIKDQGKVIKNYYGTMDIKKINDGLLDSKILGAFNTVIALLGSIIIIVMNIMIIQNYTRTTDNQALIKESLQSVQQQIKALTDKIGTEIGPKVSLIDTSSTITIPANIGLLGSKISQSTSSINENVNDKCKFTLPPLKIHECNISCPNPLPFREYRPISQGVSDLVGLPNQICLQKTTSTILKPRLISYTLPINTREGVCITDPLLAVDNGFFAYSHLEKIGSCTRGIAKQRIIGVGEVLDRGDKVPSMFMTNVWTPPNPSTIHHCSSTYHEDFYYTLCAVSHVGDPILNSTSWTESLSLIRLAVRPKSDSGDYNQKYIAITKVERGKYDKVMPYGPSGIKQGDTLYFPAVGFLPRTEFQYNDSNCPIIHCKYSKAENCRLSMGVNSKSHYILRSGLLKYNLSLGGDIILQFIEIADNRLTIGSPSKIYNSLGQPVFYQASYSWDTMIKLGDVDTVDPLRVQWRNNSVISRPGQSQCPRFNVCPEVCWEGTYNDAFLIDRLNWVSAGVYLNSNQTAENPVFAVFKDNEILYQVPLAEDDTNAQKTITDCFLLENVIWCISLVEIYDTGDSVIRPKLFAVKIPAQCSES

SEQ ID NO: 71 - protein, 602 aa, Nipah virus
  MISC_FEATURE: attachment glycoprotein
MPAENKKVRFENTTSDKGKIPSKVIKSYYGTMDIKKINEGLLDSKILSAFNTVIALLGSIVIIVMNIMIIQNYTRSTDNQAVIKDALQGIQQQIKGLADKIGTEIGPKVSLIDTSSTITIPANIGLLGSKISQSTASINENVNEKCKFTLPPLKIHECNISCPNPLPFREYRPQTEGVSNLVGLPNNICLQKTSNQILKPKLISYTLPVVGQSGTCITDPLLAMDEGYFAYSHLERIGSCSRGVSKQRIIGVGEVLDRGDEVPSLFMTNVWTPPNPNTVYHCSAVYNNEFYYVLCAVSTVGDPILNSTYWSGSLMMTRLAVKPKSNGGGYNQHQLALRSIEKGRYDKVMPYGPSGIKQGDTLYFPAVGFLVRTEFKYNDSNCPITKCQYSKPENCRLSMGIRPNSHYILRSGLLKYNLSDGENPKVVFIEISDQRLSIGSPSKIYDSLGQPVFYQASFSWDTMIKFGDVLTVNPLVVNWRNNTVISRPGQSQCPRFNTCPEICWEGVYNDAFLIDRINWISAGVFLDSNQTAENPVFTVFKDNEILYRAQLASEDTNAQKTITNCFLLKNKIWCISLVEIYDTGDNVIRPKLFAVKIPEQCT

SEQ ID NO: 72 - protein, 572 aa, Swine parainfluenza virus 3
  MISC_FEATURE: hrmagglutinin neuraminidase HN
MEYWKHTNSTKDTNNELGTTRDRHSSKATNIIMYIFWTTTSTILSVIFIMILINLIQENNHNKLMLQEIKKEFAVIDTKIQKTSDDISTSIQSGINTRLLTIQSHVQNYIPLSLTQQMSDLRKFINDLTTKREHQEVPIQRMTHDSGIEPLNPDKFWRCTSGNPSLTSSPKIRLIPGPGLLATSTTVNGCIRIPSLAINNLIYAYTSNLITQGCQDIGKSYQVLQIGIITINSDLVPDLNPRVTHTFNIDDNRKSCSLALLNTDVYQLCSTPKVDERSDYASTGIEDIVLDIVTSNGLIITTRFTNNNITFDKPYAALYPSVGPGIYYKDKVIFLGYGGLEHEENGDVICNTTGCPGKTQRDCNQASYSPWFSNRRMVNSIIVVDKSIDTTFSLRVWTIPMRQNYWGSEGRLLLLGDRIYIYTRSTSWHSKLQLGVIDISDYNNIRINWTWHNVLSRPGNDECPWGHSCPDGCITGVYTDAYPLNPSGSVVSSVILDSQKSRENPIITYSTATNRVNELAIYNRTLPAAYTTTNCITHYDKGYCFHIVEINHRSLNTFQPMLFKTEVPKNCS

SEQ ID NO: 73 - protein, 231 aa, human metapneumovirus
  MISC_FEATURE: attachment glycoprotein G
MEVRVENIRAIDMFKAKIKNRIRSSRCYRNATLILIGLTALSMALNIFLIIDHATLRNMIKTENCANMPSAEPSKKTPMTSTAGPSTKPNPQQATQWTTENSTSPAATLEGHPYTGTTQTPDTTAPQQTTDKHTALPKSTNEQITQTTTEKKTTRATTQKREKRKENTNQTTSTAATQTTNTTNQTRNASETITTSDGPRIDTTTQSSEQTARATEPGSSPYHARRGAGPR

SEQ ID NO: 74 - protein, 595 aa, Feline morbillivirus
  MISC_FEATURE: hemagglutinin protein
MKNINIKYYKDSNRYLGKILDEHKIVNSQLYSLSIKVITIIAIIVSLIATIMTIINATSGRTTLNSNTDILLNQRDEIHSIHEMIFDRVYPLITAMSTELGLHIPTLLDELTKAIDQKIKIMNPPVDTVTSDLSWCIKPPNGIIIDPKGYCESMELSKTYKLLLDQLDVSRKKSLTINRKNINQCQLVDDSEIIFATVNIQSTPRFLNFGHTVSNQRITFGQGTYSSTYILTIQEDGITDVQYRVFEIGYISDQFGVFPSLIVSRVLPIRMVLGMESCTLTSDRQGGYFLCMNTLTRSIYDYVNIRDLKSLYITLPHYGKVNYTYFNFGKIRSPHEIDKLWLTSDRGQIISGYFAAFVTITIRNYNNYPYKCLNNPCFDNSENYCRGWYKNITGTDDVPILAYLLVEMYDEEGPLITLVAIPPYNYTAPSHNSLYYDDKINKLIMTTSHIGYIQINEVHEVIVGDNLKAILLNRLSDEHPNLTACRLNQGIKEQYKSDGMIISNSALIDIQERMYITVKAIPPVGNYNFTVELHSRSNTSYILLPKQFNAKYDKLHLECFNWDKSWWCALIPQFSLSWNESLSVDTAIFNLINCK

SEQ ID NO: 75 - protein, 613 aa, Avian paramyxovirus 6
MASPSELNRSQATLYEGDPNSKRTWRTVYRASTLILDLAILCVSIVAIVRMSTLTPSDVTDSISSSITSLSDTYQSVWSDTHQKVNSIFKEVGISIPVTLDKMQVEMGTAVNIITDAVRQLQGVNGSAGFSITNSPEYSGGIDALIYPQKSLNGKSLAISDLLEHPSFIPAPTTSHGCTRIPTFHLGYRHWCYSHNTIESGCHDAGESIMYLSMGAVGVGHQGKPVFTTSAAVILDDGKNRKSCSVVANPNGCDVLCSLVKQTEDQDYADPTPTPMIHGRLHFNGTYTESMLDQSLFTGHWVAQYPAVGSGSVSHGRLFFPLYGGISKSSSLFPKLRAHAYFTHNEELECKNLTSKQREDLFNAYMPGKIAGSLWAQGIVICNLTTLADCKIAVANTSTMMMAAEGRLQLVQDKVVLYQRSSSWWPVLIYYDILVSELVNARHLDIVNWVPYPQSKFPRPTWTKGLCEKPSICPAVCVTGVYQDVWVVSVGDFSNETVVIGGYLEAASERKDPWIAAANQYNWLTRRQLFTAQTEAAYSSTTCFRNTHQDKVFCLTIMEVTDNLLGDWRIAPLLYEVTVVDRQQSSRKAVAMSEAHRTRFKYYSPENKFTPQH

SEQ ID NO: 76 - protein, 564 aa, Fer-de-Lance paramyxovirus
  MISC_FEATURE: hemagglutinin neuraminidase protein
MDPKSYYCNEDLRSDGGEKSPGGDLYKGIILVSTVISLIIAIISLAFIIDNKINIQSLDPLRGLEDSYLVPIKDKSESISQDIQEGIFPRLNLITAATTTTIPRSIAIQTKDLSDLIMNRCYPSVVNNDTSCDVLAGAIHSNLFSQLDPSTYWTCSSGTPTMNQTVKLLPDNSQIPGSTYSTGCVRIPTFSLGSMIYSYSHNVIYEGCNDHSKSSQYWQLGYISTSKTGEPLQQVSRTLTLNNGLNRKSCSTVAQGRGAYLLCTNVVEDERTDYSTEGIQDLTLDYIDIFGAERSYRYTNNEVDLDRPYAALYPSVGSGTVYNDRILFLGYGGLMTPYGDQAMCQAPECTSATQEGCNSNQLIGYFSGRQIVNCIIEIITVGTEKPIIRVRTIPNSQVWLGAEGRIQTLGGVLYLYIRSSGWHALAQTGIILTLDPIRISWIVNTGYSRPGNGPCSASSRCPAQCITGVYTDIFPLSQNYGYLATVTLLSGVDRVNPVISYGTSTGRVADSQLTSSSQVAAYTTTTCFTFNQKGYCYHIIELSPATLGIFQPVLVVTEIPKICS

SEQ ID NO: 77 - protein, 569 aa, Avian paramyxovirus 4
  MISC_FEATURE: hemagglutinin neruaminidase
MQGNMEGSRDNLTVDDELKTTWRLAYRVVSLLLMVSALIISIVILTRDNSQSIITAINQSSDADSKWQTGIEGKITSIMTDTLDTRNAALLHIPLQLNTLEANLLSALGGNTGIGPGDLEHCRYPVHDTAYLHGVNRLLINQTADYTAEGPLDHVNFIPAPVTTTGCTRIPSFSVSSSIWCYTHNVIETGCNDHSGSNQYISMGVIKRAGNGLPYFSTVVSKYLTDGLNRKSCSVAAGSGHCYLLCSLVSEPEPDDYVSPDPTPMRLGVLTWDGSYTEQAVPERIFKNIWSANYPGVGSGAIVGNKVLFPFYGGVRNGSTPEVMNRGRYYYIQDPNDYCPDPLQDQILRAEQSYYPTRFGRRMVMQGVLACPVSNNSTIASQCQSYYFNNSLGFIGAESRIYYLNGNIYLYQRSSSWWPHPQIYLLDSRIASPGTQNIDSGVNLKMLNVTVITRPSSGFCNSQSRCPNDCLFGVYSDIWPLSLTSDSIFAFTMYLQGKTTRIDPAWALFSNHAIGHEARLFNKEVSAAYSTTTCFSDTIQNQVYCLSILEVRSELLGAFKIVPFLYRVL

SEQ ID NO: 78 - protein, 571 aa, Human parainfluenza virus 2
  MISC_FEATURE: hemagglutinin-neuraminidase protein
MEDYSNLSLKSIPKRTCRIIFRTATILGICTLIVLCSSILHEIIHLDVSSGLMDSDDSQQGIIQPIIESLKSLIALANQILYNVAIIIPLKIDSIETVIFSALKDMHTGSMSNTNCTPGNLLLHDAAYINGINKFLVLKSYNGTPKYGPLLNIPSFIPSATSPNGCTRIPSFSLIKTHWCYTHNVMLGDCLDFTTSNQYLAMGIIQQSAAAFPIFRTMKTIYLSDGINRKSCSVTAIPGGCVLYCYVATRSEKEDYATTDLAELRLAFYYYNDTFIERVISLPNTTGQWATINPAVGSGIYHLGFILFPVYGGLISGTPSYNKQSSRYFIPKHPNITCAGNSSEQAAAARSSYVIRYHSNRLIQSAVLICPLSDMHTARCNLVMFNNSQVMMGAEGRLYVIDNNLYYYQRSSSWWSASLFYRINTDFSKGIPPIIEAQWVPSYQVPRPGVMPCNATSFCPANCITGVYADVWPLNDPEPTSQNALNPNYRFAGAFLRNESNRTNPTFYTASASALLNTTGFNNTNHKAAYTSSTCFKNTGTQKIYCLIIIEMGSSLLGEFQIIPFLRELIP

SEQ ID NO: 79 - protein, 565 aa, Parainfluenza virus 5
  MISC_FEATURE: hemagglutinin-neuraminidase protein
MVAEDAPVRATCRVLFRTTTLIFLCTLLALSISILYESLITQKQIMSQAGSTGSNSGLGSITDLLNNILSVANQIIYNSAVALPLQLDTLESTLLTAIKSLQTSDKLEQNCSWSAALINDNRYINGINQFYFSIAEGRNLTLGPLLNMPSFIPTATTPEGCTRIPSFSLTKTHWCYTHNVILNGCQDHVSSNQFVSMGIIEPTSAGFPFFRTLKTLYLSDGVNRKSCSISTVPGGCMMYCFVSTQPERDDYFSAAPPEQRIIIMYYNDTIVERIINPPGVLDVWATLNPGTGSGVYYLGWVLFPIYGGVIKGTSLWNNQANKYFIPQMVAALCSQNQATQVQNAKSSYYSSWFGNRMIQSGILACPLRQDLTNECLVLPFSNDQVLMGAEGRLYMYGDSVYYYQRSNSWWPMTMLYKVTITFTNGQPSAISAQNVPTQQVPRPGTGDCSATNRCPGFCLTGVYADAWLLTNPSSTSTFGSEATFTGSYLNTATQRINPTMYIANNTQIISSQQFGSSGQEAAYGHTTCFRDTGSVMVYCIYIIELSSSLLGQFQIVPFIRQVTLS

SEQ ID NO: 80 - protein, 576 aa, Porcine rubulavirus
  MISC_FEATURE: attachment protein
MSQLGTDQIMHLAQPAIARRTWRLCFRIFALFILIAIVITQIFMLTFDHTLLTTTQFLTSIGNLQSTITSWTPDVQAMLSISNQLIYTTSITLPLKISTTEMSILTAIRDHCHCPDCSSACPTRQMLLNDPRYMSGVNQFIGAPTESINITFGPLFGIPSFIPTSTTTQGCTRIPSFALGPSHWCYTHNFITAGCADGGHSNQYLAMGTIQSASDGSPLLITARSYYLSDGVNRKSCSIAVVPGGCAMYCYVATRSETDYYAGNSPPQQLLTLVFSNDTIIERTIHPTGLANGWVMLVPGVGSGTLYNEYLLFPAYGGMQQILANQSGEINQFFTPYNATVRCAMAQPQFSQRAAASYYPRYFSNRWIRSAIVACPYRAIYQTQCTLIPLPNRMVMMGSEGRIFTLGDRLFYYQRSSSWWPYPLLYQVGLNFLTTPPSVSSMTQVPLEHLARPGKGGCPGNSHCPATCVTGVYADVWPLTDPRSGVGGTSLVAAGGLDSTSERMAPVNYLAIGESLLSKTYLLSKTQPAAYTTTTCFRDTDTGKIYCITIAELGKVLLGEFQIVPFLREIKIQSRY

SEQ ID NO: 81 - protein, 580 aa, Avian paramyxovirus 2
  MISC_FEATURE: hemagglutinin-neuraminidase
MDFPSRENLAAGDISGRKTWRLLFRILTLSIGVVCLAINIATIAKLDHLDNMASNTWTTTEADRVISSITTPLKVPVNQINDMFRIVALDLPLQMTSLQKEITSQVGFLAESINNVLSKNGSAGLVLVNDPEYAGGIAVSLYQGDASAGLNFQPISLIEHPSFVPGPTTAKGCIRIPTFHMGPSHWCYSHNIIASGCQDASHSSMYISLGVLKASQTGSPIFLTTASHLVDDNINRKSCSIVASKYGCDILCSIVIETENEDYRSDPATSMIIGRLFFNGSYTESKINTGSIFSLFSANYPAVGSGIVVGDEAAFPIYGGVKQNTWLFNQLKDFGYFTHNDVYKCNRTDIQQTILDAYRPPKISGRLWVQGILLCPVSLRPDPGCRLKVFNTSNVMMGAEARLIQVGSTVYLYQRSSSWWVVGLTYKLDVSEITSQTGNTLNHVDPIAHTKFPRPSFRRDACARPNICPAVCVSGVYQDIWPISTATNNSNIVWVGQYLEAFYSRKDPRIGIATQYEWKVTNQLFNSNTEGGYSTTTCFRNTKRDKAYCVVISEYADGVFGSYRIVPQLIEIRTTTGKSE

SEQ ID NO: 82 - protein, 236 aa, Human metapneumovirus
  MISC_FEATURE: attachment glycoprotein G
MEVKVENIRTIDMLKARVKNRVARSKCFKNASLILIGITTLSIALNIYLIINYTMQENTSESEHHTSSSPMESSRETPTVPIDNSDTNPSSQYPTQQSTEGSTLYFAASASSPETEPTSTPDTTSRPPFVDTHTTPPSASRTKTSPAVHTKNNPRISSRTHSPPWAMTRTVRRTTTLRTSSIRKRSSTASVQPDSSATTHKHEEASPVSPQTSASTTRPQRKSMEASTSTTYNQTS

SEQ ID NO: 83 - protein, 414 aa, Canine pneumovirus
  MISC_FEATURE: attachment protein
MRPAEQLIQENYKLTSLSMGRNFEVSGSTTNLNFERTQYPDTFRAVVKVNQMCKLIAGVLTSAAVAVCVGVIMYSVFTSNHKANSMQNATIRNSTSAPPQPTAGPPTTEQGTTPKFTKPPTKTTTHHEITEPAKMVTPSEDPYQCSSNGYLDRPDLPEDFKLVLDVICKPPGPEHHSTNCYEKREINLGSVCPDLVTMKANMGLNNGGGEEAAPYIEVITLSTYSNKRAMCVHNGCDQGFCFFLSGLSTDQKRAVLELGGQQAIMELHYDSYWKHYWSNSNCVVPRTNCNLTDQTVILFPSFNNKNQSQCTTCADSAGLDNKFYLTCDGLSRNLPLVGLPSLSPQAHKAALKQSTGTTTAPTPETRNPTPAPRRSKPLSRKKRALCGVDSSREPKPTMPYWCPMLQLFPRRSNS

SEQ ID NO: 84 - protein, 228 aa, Respiratory syncytial virus type A
  MISC_FEATURE: truncated attachment glycoprotein
MSKTKDQRAAKTLEKTWDTLNHLLFISSCLYKSNLKSIAQITLSILAMTIPTSLIIVATTFIASANNKVTPTTAIIQDATSQIKNTTPTHLTQNPQPGISFFNLSGTISQTTAILAPTTPSVEPILQSTTVKTKNTTTTQIQPSKLTTKQRQNKPPNKPNDDFHFEVFNFVPCSICSNNPTCWAICKRIPSKKPGKKTTTKPTKKQTIKTTKKDLKPQTTKPKEAPTT

SEQ ID NO: 85 - protein, 577 aa, Avian paramyxovirus 8
  MISC_FEATURE: hemagglutinin-neuraminidase protein
MSNIASSLENIVEQDSRKTTWRAIFRWSVLLITTGCLALSIVSIVQIGNLKIPSVGDLADEVVTPLKTTLSDTLRNPINQINDIFRIVALDIPLQVTSIQKDLASQFSMLIDSLNAIKLGNGTNLIIPTSDKEYAGGIGNPVFTVDAGGSIGFKQFSLIEHPSFIAGPTTTRGCTRIPTFHMSESHWCYSHNIIAAGCQDASASSMYISMGVLHVSSSGTPIFLTTASELIDDGVNRKSCSIVATQFGCDILCSIVIEKEGDDYWSDTPTPMRHGRFSFNGSFVETELPVSSMFSSFSANYPAVGSGEIVKDRILFPIYGGIKQTSPEFTELVKYGLFVSTPTTVCQSSWTYDQVKAAYRPDYISGRFWAQVILSCALDAVDLSSCIVKIMNSSTVMMAAEGRIIKIGIDYFYYQRSSSWWPLAFVTKLDPQELADTNSIWLTNSIPIPQSKFPRPSYSENYCTKPAVCPATCVTGVYSDIWPLTSSSSLPSIIWIGQYLDAPVGRTYPRFGIANQSHWYLQEDILPTSTASAYSTTTCFKNTARNRVFCVTIAEFADGLFGEYRITPQLYELVRNN

SEQ ID NO: 86 - protein, 576 aa, Porcine parainfluenza virus 1
  MISC_FEATURE: hemagglutinin protein
MEETKVKTSEYWARSPQIHATNHPNVQNREKIKEILTILISFISSLSLVLVIAVLIMQSLHNGTILRCKDVGLESINKSTYSISNAILDVIKQELITRIINTQSSVQVALPILINKKIQDLSLIIEKSSKVHQNSPTCSGVAALTHVEGIKPLDPDDYWRCPSGEPYLEDELTLSLIPGPSMLAGTSTIDGCVRLPSLAIGKSLYAYSSNLITKGCQDIGKSYQVLQLGIITLNSDLHPDLNPIISHTYDINDNRKSCSVAVSETKGYQLCSMPRVNEKTDYTSDGIEDIVFDVLDLKGSSRSFKFSNNDINFDHPFSALYPSVGSGIIWKNELYFLGYGALTTALQGNTKCNLMGCPGATQDNCNKFISSSWLYSKQMVNVLIQVKGYLSSKPSIIVRTIPITENYVGAEGKLVGTRERIYIYTRSTGWHTNLQIGVLNINHPITITWTDHRVLSRPGRSPCAWNNKCPRNCTTGVYTDAYPISPDANYVATVTLLSNSTRNNPTIMYSSSDRVYNMLRLRNTELEAAYTTTSCIVHFDRGYCFHIIEINQKELNTLQPMLFKTAIPKACRISNL

SEQ ID NO: 87 - protein, 579 aa, Human parainfluenza virus 4b
  MISC_FEATURE: hemagglutinin-neuraminidase protein
MQDSRGNTQIFSQANSMVKRTWRLLFRIVTLILLISIFVLSLIIVLQSTPGNLQSDVDIIRKELDELMENFETTSKSLLSVANQITYDVSVLTPIRQEATETNIIAKIKDHCKDRVVKGESTCTLGHKPLHDVSFLNGFNKFYFTYRDNVQIRLNPLLDYPNFIPTATTPHGCIRIPSFSLSQTHWCYTHNTILRGCEDTASSKQYVSLGTLQTLENGDPYFKVEYSHYLNDRKNRKSCSVVAVLDGCLLYCVIMTKNETENFKDPQLATQLLTYISYNGTIKERIINPPGSSRDWVHISPGVGSGILYSNYIIFPLYGGLMENSMIYNNQSGKYFFPNSTKLPCSNKTSEKITGAKDSYTITYFSKRLIQSAFLICDLRQFLSEDCEILIPSNDHMLVGAEGRLYNIENNIFYYQRGSSWWPYPSLYRIKLNSNKKYPRIIEIKFTKIEIAPRPGNKDCPGNKACPKECITGVYQDIWPLSYPNTAFPHKKRAYYTGFYLNNSLARRNPTFYTADNLDYHQQERLGKFNLTAGYSTTTCFKQTTTARLYCLYILEVGDSVIGDFQIFPFLRSIDQAIT

SEQ ID NO: 88 - protein, 582 aa, Avian paramyxovirus 2
  MISC_FEATURE: hemagglutinin-neuraminidase protein
MDALSRENLTEISQGGRRTWRMLFRILTLVLTLVCLAINIATIAKLDSIDTSKVQTWTTTESDRVIGSLTDTLKIPINQVNDMFRIVALDLPLQMTTLQKEIASQVGFLAESINNFLSKNGSAGSVLVNDPEYAGGIGTSLFHGDSASGLDFEAPSLIEHPSFIPGPTTAKGCIRIPTFHMSASHWCYSHNIIASGCQDAGHSSMYISMGVLKATQAGSPSFLTTASQLVDDKLNRKSCSIISTTYGCDILCSLVVENEDADYRSDPPTDMILGRLFFNGTYSESKLNTSAIFQLFSANYPAVGSGIVLGDEIAFPVYGGVKQNTWLFNQLKDYGYFAHNNVYKCNNSNIHQTVLNAYRPPKISGRLWSQVVLICPMRLFINTDCRIKVFNTSTVMMGAEARLIQVGSDIYLYQRSSSWWVVGLTYKLDFQELSSKTGNILNNVSPIAHAKFPRPSYSRDACARPNICPAVCVSGVYQDIWPISTAHNLSQVVWVGQYLEAFYARKDPWIGIATQYDWKKNVRLFNANTEGGYSTTTCFRNTKRDKAFCVIISEYADGVFGSYRIVPQLIEIRTTSKKGLPS

SEQ ID NO: 89 - protein, 610 aa, Avian paramyxovirus goose/Shimane/67/2000
  MISC_FEATURE: hemagglutinin-neuraminidase
MQPGISEVSFVNDERSERGTWRLLFRILTIVLCLTSIGIGIPALIYSKEAATSGDIDKSLEAVKTGMSTLSSKIDESINTEQKIYRQVILEAPVSQLNMESNILSAITSLSYQIDGTSNSSGCGSPMHDQDFVGGINKEIWTTDNVNLGEITLTPFLEHLNFIPAPTTGNGCTRIPSFDLGLTHWCYTHNVILSGCQDYSSSFQYIALGVLKISATGHVFLSTMRSINLDDERNRKSCSISATSIGCDIICSLVTEREVDDYNSPAATPMIHGRLDFSGKYNEVDLNVGQLFGDWSANYPGVGGGSFLNGRVWFPIYGGVKEGTPTFKENDGRYAIYTRYNDTCPDSESEQVSRAKSSYRPSYFGGKLVQQAVLSIKIDDTLGLDPVLTISNNSITLMGAESRVLQIEEKLYFYQRGTSWFPSLIMYPLTVDDKMVRFEPPTIFDQFTRPGNHPCSADSRCPNACVTGVYTDGYPIVFHNNHSIAAVYGMQLNDVTNRLNPRSAVWYGVSMSNVIRVSSSTTKAAYTTSTCFKVKKTQRVYCLSIGEIGNTLFGEFRIVPLLLEVYSEKGKSLKSSFDGWEDISINNPLRPLDNHRVDPILISNYTSSWP

SEQ ID NO: 90 - protein, 257 aa, Bovine respiratory syncytial virus
  MISC_FEATURE: attachment glycoprotein
MSNHTHHLKFKTLKRAWKASKYFIVGLSCLYKFNLKSLVQTALTTLAMITLTSLVITAIIYISVGNAKAKPTSKPTIQQTQQPQNHTSPFFTEHNYKSTHTSIQSTTLSQLPNTDTTRETTYSHSINETQNRKIKSQSTLPATRKPPINPSGSNPPENHQDHNNSQTLPYVPCSTCEGNLACLSLCQIGPERAPSRAPTITLKKTPKPKTTKKPTKTTIHHRTSPEAKLQPKNNTAAPQQGILSSPEHHTNQSTTQI

SEQ ID NO: 91 - protein, 595 aa, Menangle virus
  MISC_FEATURE: attachemnt protein
  MISC_FEATURE: attachement protein
MWNSIPQLVSDHEEAKGKFTDIPLQDDTDSQHPSGSKSTCRTLFRTVSIILSLVILVLGVTSTMFSAKYSGGCATNSQLLGVSNLINQIQKSIDSLISEVNQVSITTAVTLPIKIMDFGKSVTDQVTQMIRQCNTVCKGPGQKPGSQNVRIMPSNNLSTFQNINMSARGIAYQDVPLTFVRPIKNPQSCSRFPSYSVSFGVHCFANAVTDQTCELNQNTFYRVVLSVSKGNISDPSSLETKAETRTPKGTPVRTCSIISSVYGCYLLCSKATVPESEEMKTIGFSQMFILYLSMDSKRIIYDNIVSSTSAIWSGLYPGEGAGIWHMGQLFFPLWGGIPFLTPLGQKILNSTLDIPEVGSKCKSDLTSNPAKTKDMLFSPYYGENVMVFGFLTCYLLSNVPTNCHADYLNSTVLGFGSKAQFYDYRGIVYMYIQSAGWYPFTQIFRITLQLKQNRLQAKSIKRIEVTSTTRPGNRECSVLRNCPYICATGLFQVPWIVNSDAITSKEVDNMVFVQAWAADFTEFRKGILSLCSQVSCPINDLLSKDNSYMRDTTTYCFPQTVPNILSCTSFVEWGGDSGNPINILEIHYEVIFVAS

SEQ ID NO: 92 - protein, 574 aa, avian paramyxovirus 5
  MISC_FEATURE: hemagglutinin-neuraminidase protein
MDKSYYTEPEDQRGNSRTWRLLFRLIVLTLLCLIACTSVSQLFYPWLPQVLSTLISLNSSIITSSNGLKKEILNQNIKEDLIYREVAINIPLTLDRVTVEVGTAVNQITDALRQLQSVNGSAAFALSNSPDYSGGIEHLVFQRNTLINRSVSVSDLIEHPSFIPTPTTQHGCTRIPTFHLGTRHWCYSHNIIGQGCADSGASMMYISMGALGVSSLGTPTFTTSATSILSDSLNRKSCSIVATTEGCDVLCSIVTQTEDQDYADHTPTPMIHGRLWFNGTYTERSLSQSLFLGTWAAQYPAVGSGIMTPGRVIFPFYGGVIPNSPLFLDLERFALFTHNGDLECRNLTQYQKEAIYSAYKPPKIRGSLWAQGFIVCSVGDMGNCSLKVINTSTVMMGAEGRLQLVGDSVMYYQRSSSWWPVGILYRLSLVDIIARDIQVVINSEPLPLSKFPRPTWTPGVCQKPNVCPAVCVTGVYQDLWAISAGETLSEMTFFGGYLEASTQRKDPWIGVANQYSWFMRRRLFKTSTEAAYSSSTCFRNTRLDRNFCLLIFELTDNLLGDWRIVPLLFELTIV

SEQ ID NO: 93 - protein, 622 aa, cedar virus
  MISC_FEATURE: attachment glycoprotein
MLSQLQKNYLDNSNQQGDKMNNPDKKLSVNFNPLELDKGQKDLNKSYYVKNKNYNVSNLLNESLHDIKFCIYCIFSLLIIITIINIITISIVITRLKVHEENNGMESPNLQSIQDSLSSLTNMINTEITPRIGILVTATSVTLSSSINYVGTKTNQLVNELKDYITKSCGFKVPELKLHECNISCADPKISKSAMYSTNAYAELAGPPKIFCKSVSKDPDFRLKQIDYVIPVQQDRSICMNNPLLDISDGFFTYIHYEGINSCKKSDSFKVLLSHGEIVDRGDYRPSLYLLSSHYHPYSMQVINCVPVTCNQSSFVFCHISNNTKTLDNSDYSSDEYYITYFNGIDRPKTKKIPINNMTADNRYIHFTFSGGGGVCLGEEFIIPVTTVINTDVFTHDYCESFNCSVQTGKSLKEICSESLRSPTNSSRYNLNGIMIISQNNMTDFKIQLNGITYNKLSFGSPGRLSKTLGQVLYYQSSMSWDTYLKAGFVEKWKPFTPNWMNNTVISRPNQGNCPRYHKCPEICYGGTYNDIAPLDLGKDMYVSVILDSDQLAENPEITVFNSTTILYKERVSKDELNTRSTTTSCFLFLDEPWCISVLETNRFNGKSIRPEIYSYKIPKYC

SEQ ID NO: 94 - protein, 595 aa, teviot virus
  MISC_FEATURE: attachment protein
MWSTQASKHPAMVNSATNLVDIPLDHPSSAQFPINRKRTGRLIYRLFSILCNLILISILISLVVIWSRSSRDCAKSDGLSSVDNQLSSLSRSINSLITEVNQISVTTAINLPIKLSEFGKSVVDQVTQMIRQCNAACKGPGEKPGIQNVRINIPNNFSTYSELNRTANSLNFQSRTALFARPNPYPKTCSRFPSYSVYFGIHCFSHAVTDSSCELSDSTYYRLVIGVADKNLSDPADVKYIGETTTPVRVQTRGCSVVSSIYGCYLLCSKSNQDYQDDFREQGFHQMFILFLSRELKTTFFDDMVSSTTVTWNGLYPGEGSGIWHMGHLVFPLWGGIRFGTHASEGILNSTLELPPVGPSCKRSLADNGLINKDVLFSPYFGDSVMVFAYLSCYMLSNVPTHCQVETMNSSVLGFGSRAQFYDLKGIVYLYIQSAGWFSYTQLFRLSLQSKGYKLSVKQIKRIPISSTSRPGTEPCDIIHNCPYTCATGLFQAPWIVNGDSIRDRDVRNMAFVQAWSGAINTFQRPFMSICSQYSCPLSELLDSESSIMRSTTTYCFPSLTESILQCVSFIEWGGPVGNPISINEVYSSISFRPD

SEQ ID NO: 95 - protein, 632 aa, Mossman virus
  MISC_FEATURE: attachment glycoprotein
MVDPPAVSYYTGTGRNDRVKVVTTQSTNPYWAHNPNQGLRRLIDMVVNVIMVTGVIFALINIILGIVIISQSAGSRQDTSKSLDIIQHVDSSVAITKQIVMENLEPKIRSILDSVSFQIPKLLSSLLGPGKTDPPIALPTKASTPVIPTEYPSLNTTTCLRIEESVTQNAAALFNISFDLKTVMYELVTRTGGCVTLPSYSELYTRVRTFSTAIRNPKTCQRAGQETDLNLIPAFIGTDTGILINSCVRQPVIATGDGIYALTYLTMRGTCQDHRHAVRHFEIGLVRRDAWWDPVLTPIHHFTEPGTPVFDGCSLTVQNQTALALCTLTTDGPETDIHNGASLGLALVHFNIRGEFSKHKVDPRNIDTQNQGLHLVTTAGKSAVKKGILYSFGYMVTRSPEPGDSKCVTEECNQNNQEKCNAYSKTTLDPDKPRSMIIFQIDVGAEYFTVDKVVVVPRTQYYQLTSGDLFYTGEENDLLYQLHNKGWYNKPIRGRVTFDGQVTLHEHSRTYDSLSNQRACNPRLGCPSTCELTSMASYFPLDKDFKAAVGVIALRNGMTPIITYSTDDWRNHWKYIKNADLEFSESSLSCYSPNPPLDDYVLCTAVITAKVMSNTNPQLLATSWYQYDKCHT

SEQ ID NO: 96 - protein, 709 aa, J-virus
  MISC_FEATURE: attachment glycoprotein
MNPVAMSNFYGINQADHLREKGDQPEKGPSVLTYVSLITGLLSLFTIIALNVTNIIYLTGSGGTMATIKDNQQSMSGSMRDISGMLVEDLKPKTDLINSMVSYTIPSQISAMSAMIKNEVLRQCTPSFMFNNTICPIAEHPVHTSYFEEVGIEAISMCTGTNRKLVVNQGINFVEYPSFIPGSTKPGGCVRLPSFSLGLEVFAYAHAITQDDCTSSSTPDYYFSVGRIADHGTDVPVFETLAEWFLDDKMNRRSCSVTAAGKGGWLGCSILVGSFTDELTSPEVNRISLSYMDTFGKKKDWLYTGSEVRADQSWSALFFSVGSGVVIGDTVYFLVWGGLNHPINVDAMCRAPGCQSPTQSLCNYAIKPQEWGGNQIVNGILHFKHDTNEKPTLHVRTLSPDNNWMGAEGRLFHFHNSGKTFIYTRSSTWHTLPQVGILTLGWPLSVQWVDITSISRPGQSPCEYDNRCPHQCVTGVYTDLFPLGVSYEYSVTAYLDQVQSRMNPKIALVGAQEKIYEKTITTNTQHADYTTTSCFAYKLRVWCVSIVEMSPGVITTRQPVPFLYHLNLGCQDTSTGSLTPLDAHGGTYLNTDPVGNKVDCYFVLHEGQIYFGMSVGPINYTYSIVGRSREIGANMNVSLNQLCHSVYTEFLKEKEHPGTRNNIDVEGWLLKRIETLNGTKIFGLDDLEGSGPGHQSGPEDPSIAPIGHN

SEQ ID NO: 97 - protein, 264 aa, Avian metapneumovirus
  MISC_FEATURE: attachment glycoprotein
MEVKVENVGKSQELKVKVKNFIKRSDCKKKLFALILGLVSFELTMNIMLSVMYVESNEALSLCRIQGTPAPRDNKTNTENATKETTLHTTTTTRDPEVRETKTTKPQANEGATNPSRNLTTKGDKHQTTRATTEAELEKQSKQTTEPGTSTQKHTPARPSSKSPTTTQATAQPTTPTAPKASTAPKNRQATTKKTETDTTTASRARNTNNPTETATTTPKATTETGKGKEGPTQHTTKEQPETTARETTTPQPRRTAGASPRAS

SEQ ID NO: 98 - protein, 391 aa, Avian metapneumovirus
  MISC_FEATURE: attachment protein
MGSKLYMVQGTSAYQTAVGFWLDIGRRYILAIVLSAFGLTCTVTIALTVSVIVEQSVLEECRNYNGGDRDWWSTTQEQPTTAPSATPAGNYGGLQTARTRKSESCLHVQISYGDMYSRSDTVLGGFDCMGLLVLCKSGPICQRDNQVDPTALCHCRVDLSSVDCCKVNKISTNSSTTSEPQKTNPAWPSQDNTDSDPNPQGITTSTATLLSTSLGLMLTSKTGTHKSGPPQALPGSNTNGKTTTDRELGSTNQPNSTTNGQHNKHTQRMTLPPSYDNTRTILQHTTPWEKTFSTYKPTHSPTNESDQSLPTTQNSINCEHFDPQGKEKICYRVGSYNSNITKQCRIDVPLCSTYNTVCMKTYYTEPFNCWRRIWRCLCDDGVGLVEWCCTS

SEQ ID NO: 99 - protein, 1052 aa, Tailam virus
  MISC_FEATURE: attachment glycoprotein
MSQLAAHNLAMSNFYGIHQGGQSTSQKEEEQPVQGVIRYASMIVGLLSLFTIIALNVTNIIYMTESGGTMQSIKNAQGSIDGSMKDLSGTIMEDIKPKTDLINSMVSYNIPAQLSMIHQIIKNDVLKQCTPSFMFNNTICPLAENPTHSRYFEEVNLDSISECSGNEMSLELGTEPEFIEYPSFAPGSTKPGSCVRLPSFSLSSTVFAYTHTIMGHGCSELDVGDHYLAIGRIADAGHEIPQFETISSWFINDKINRRSCTVAAGVMETWMGCVIMTETFYDDLDSLDTGKITISYLDVFGRKKEWIYTRSEILYDYTYTSVYFSIGSGVVVGDTVYFLLWGSLSSPIEETAYCYAPGCSNYNQRMCNEAQRPAKFGHRQMANAILRFKTNSMGKPSISVRTLSPTVIPFGTEGRLIYSDFTKIIYLYLRSTSWYVLPLTGLLILGPPVSISWVTQEAVSRPGEYPCGASNRCPKDCITGVYTDLFPLGARYEYAVTVYLNAETYRVNPTLALIDRSKIIARKKITTESQKAGYTTTTCFVFKLRIWCMSVVELAPATMTAFEPVPFLYQLDLTCKRNNGTTAMQFSGQDGMYKSGRYKSPRNECFFEKVSNKYYFVVSTPEGIQPYEVRDLTPERVSHVIMYISDVCAPALSAFKKLIPAMRPITTLTIGNWQFRPVDISGGLRVNIYRNLTRYGDLSMSAPEDPGTDTFPGTHAPSKGHEEVGHYTLPNEKLSEVTTAAVKTKESLNLIPDTKDTRGEEENGSGLNEIITGHTTPGHIKTHPAETKVTKHTVIIPQIEEDGSGATTSTELQDETGYHTEDYNTTNTNGSLTAPNERNNYTSGDHTVSGEDITHTITVSDRTKTTQTLPTDNTFNQTPTKIQEGSPKSESTPKDYTAIESEDSHFTDPTLIRSTPEGTIVQVIGDQFHSAVTQLGESNAIGNSEPIDQGNNLIPTTDRGTMDNTSSQSHSSTTSTQGSHSAGHGSQSNMNLTALADTDSVTDQSTSTQEIDHEHENVSSILNPLSRHTRVMRDTVQEALTGAWGFIRGMIP

SEQ ID NO: 100 - protein, 242 aa, Human metapneumovirus
  MISC_FEATURE: attachment glycoprotein
MEVRVENIRAIDMFKAKIKNRIRNSRCYRNATLILIGLTALSMALNIFLIIDHATLRNMIKTENCANMPSAEPSKKTPMTSIAGPSTKPNPQQATQWTTENSTSPAATLEGHPYTGTTQTPDTTAPQQTTDKHTALPKSTNEQITQTTTEKKTTRATTQKRKKEKKTQTKPQVQLQPKQPTPPTKSEMQVRQSQHPTDPELTPLPKAVNRQPGQQNQAPHHIMHGEVQDPGERNTQVSHPSS

SEQ ID NO: 101 - protein, 585 aa, Avian metapneumovirus type C
  MISC_FEATURE: attachment glycoprotein
MEVKIENVGKSQELRVKVKNFIKRSDCKKKLFALILGLISFDITMNIMLSVMYVESNEALSSCRVQGTPAPRDNRTNTENTAKETTLHTMTTTRNTEAGGTKTTKPQADERATSPSKNPTIGADKHKTTRATTEAEQEKQSKQTTEPGTSTPKHIPARPSSKSPATTKTTTQPTTPTVAKGGTAPKNRQTTTKKTEADTPTTSRAKQTNKPTGTETTPPRATTETDKDKEGPTQHTTKEQPETTAGGTTTPQPRRTTSRPAPTTNTKEGAETTGTRTTKSTQTSASPPRPTRSTPSKTATGTNKRATTTKGPNTASTDRRQQTRTTPKQDQQTQTKAKTTTNKAHAKAATTPEHNTDTTDSMKENSKEDKTTRDPSSKATTKQENTSKGTTATNLGNNTEAGARTPPTTTPTRHTTEPATSTAGGHTKARTTRWKSTAARQPTRNNTTADTKTAQSKQTTPAQLGNNTTPENTTPPDNKSNSQTNVAPTEEIEIGSSLWRRRYVYGPCRENALEHPMNPCLKDNTTWIYLDNGRNLPAGYYDSKTDKIICYGIYRGNSYCYGRIECTCKNGTGLLSYCCNSYNWS

SEQ ID NO: 102 - protein, 609 aa, Rinderpest morbillivirus
  MISC_FEATURE: H protein
MSSPRDRVNAFYKDNLQFKNTRVVLNKEQLLIERPYMLLAVLFVMFLSLVGLLAIAGIRLHRAAVNTAEINSGLTTSIDITKSIEYQVKDVLTPLFKIIGDEVGLRTPQRFTDLTKFISDKIKFLNPDKEYDFRDINWCISPPERIKINYDQYCAHTAAEELITMLVNSSLAGTAVLRTSLVNLGRSCTGSTTTKGQFSNMSLALSGIYSGRGYNISSMITITEKGMYGSTYLVGKHNQGARRPSTAWQRDYRVFEVGIIRELGVGTPVFHMTNYLELPRQPELEICMLALGEFKLAALCLADNSVALHYGGLRDDHKIRFVKLGVWPSPADSDTLATLSAVDPTLDGLYITTHRGIIAAGKAVWAVPVTRTDDQRKMGQCRREACREKPPPFCNSTDWEPLEAGRIPAYGILTIRLGLADKPEIDIISEFGPLITHDSGMDLYTPLDGNEYWLTIPPLQNSALGTVNTLVLEPSLKISPNILTLPIRSGGGDCYTPTYLSDLADDDVKLSSNLVILPSRNLQYVSATYDTSRVEHAIVYYIYSTGRLSSYYYPVKLPIKGDPVSLQIGCFPWGLKLWCHHFCSVIDSGTGKQVTHTGAVGIEITCNSR

SEQ ID NO: 103 - protein, 575 aa, Avian paramyxovirus 10
  MISC_FEATURE: hemagglutinin neuraminidase
MDSSQMNILDAMDRESSKRTWRGVFRVTTIIMVVTCVVLSAITLSKVAHPQGFDTNELGNGIVDRVSDKITEALTVPNNQIGEIFKIVALDLHVLVSSSQQAIAGQIGMLAESINSILSQNGSASTILSSSPEYAGGIGVPLFSNKLTNGTVIKPITLIEHPSFIPGPTTIGGCTRIPTFHMASSHWCYSHNIIEKGCKDSGISSMYISLGVLQVLKKGTPVFLVTASAVLSDDRNRKSCSIISSRFGCEILCSLVTEAESDDYKSDTPTGMVHGRLYFNGTYREGLVDTETIFRDFSANYPGVGSGEIVEGHIHFPIYGGVKQNTGLYNSLTPYWLDAKNKYDYCKLPYTNQTIQNSYKPPFIHGRFWAQGILSCELDLFNLGNCNLKIIRSDKVMMGAESRLMLVGSKLLMYQRASSWWPLGITQEIDIAELHSSNTTILREVKPILSSKFPRPSYQPNYCTKPSVCPAVCVTGVYTDMWPISITGNISDYAWISHYLDAPTSRQQPRIGIANQYFWIHQTTIFPTNTQSSYSTTTCFRNQVRSRMFCLSIAEFADGVFGEFRIVPLLYELRV

SEQ ID NO: 104 - protein, 593 aa, Tioman virus
  MISC_FEATURE: attachment protein
MWATSESKAPIPANSTLNLVDVPLDEPQTITKHRKQKRTGRLVFRLLSLVLSLMTVILVLVILASWSQKINACATKEGFNSLDLQISGLVKSINSLITEVNQISITTAINLPIKLSDFGKSIVDQVTQMIRQCNAVCKGPGEKPGIQNIRINIPNNFSTYLELNNTVKSIELQRRPALLARPNPIPKSCSRFPSYSVNFGIHCFAHAITDQSCELSDKTYYRLAIGISDKNLSDPSDVKYIGEAFTPMGLQARGCSVISSIYGCYLLCSKSNQGYEADFQTQGFHQMYILFLSRDLKTTLFNDMISSTTVVWNGLYPGEGAGIWHMGYLIFPLWGGIKIGTPASTSILNSTLDLPLVGPSCKSTLEENNLINKDVLFSPYFGESVMVFGFLSCYMLSNVPTHCQVEVLNSSVLGFGSRSQLMDLKGIVYLYIQSAGWYSYTQLFRLSLQSRGYKLTVKQIRRIPISSTTRPGTAPCDVVHNCPYTCATGLFQAPWIVNGDSILDRDVRNLVFVQAWSGNFNTFQKGLISICNQYTCPLTTLLDNDNSIMRSTTTYCYPSLSEYNLQCQSFIEWGGPVGNPIGILEVHYIIKFK

SEQ ID NO: 105 - protein, 604 aa, Dolphin morbillivirus
  MISC_FEATURE: haemagglutinin protein
MSSPRDKVDAFYKDIPRPRNNRVLLDNERVIIERPLILVGVLAVMFLSLVGLLAIAGVRLQKATTNSIEVNRKLSTNLETTVSIEHHVKDVLTPLFKIIGDEVGLRMPQKLTEIMQFISNKIKFLNPDREYDFNDLHWCVNPPDQVKIDYAQYCNHIAAEELIVTKFKELMNHSLDMSKGRIFPPKNCSGSVITRGQTIKPGLTLVNIYTTRNFEVSFMVTVISGGMYGKTYFLKPPEPDDPFEFQAFRIFEVGLVRDVGSREPVLQMTNFMVIDEDEGLNFCLLSVGELRLAAVCVRGRPVVTKDIGGYKDEPFKVVTLGIIGGGLSNQKTEIYPTIDSSIEKLYITSHRGIIRNSKARWSVPAIRSDDKDKMEKCTQALCKSRPPPSCNSSDWEPLTSNRIPAYAYIALEIKEDSGLELDITSNYGPLIIHGAGMDIYEGPSSNQDWLAIPPLSQSVLGVINKVDFTAGFDIKPHTLTTAVDYESGKCYVPVELSGAKDQDLKLESNLVVLPTKDFGYVTATYDTSRSEHAIVYYVYDTARSSSYFFPFRIKARGEPIYLRIECFPWSRQLWCHHYCMINSTVSNEIVVVDNLVSINMSCSR

SEQ ID NO: 106 - protein, 734 aa, Beilong virus
  MISC_FEATURE: attachment glycoprotein
MSQLAAHNLAMSNFYGTHQGDLSGSQKGEEQQVQGVIRYVSMIVSLLSLFTIIALNVTNIIYMTESGGTMQSIKTAQGSIDGSMREISGVIMEDVKPKTDLINSMVSYNIPAQLSMIHQIIKNDVPKQCTPSFMFNNTICPLAENPTHSRYFEEVNLDSISECSGPDMHLGLGVNPEFIEFPSFAPGSTKPGSCVRLPSFSLSTTVFAYTHTIMGHGCSELDVGDHYFSVGRIADAGHEIPQFETISSWFINDKINRRSCTVAAGAMEAWMGCVIMTETFYDDRNSLDTGKLTISYLDVFGRKKEWIYTRSEILYDYTYTSVYFSVGSGVVVGDTVYFLIWGSLSSPIEETAYCFAPDCSNYNQRMCNEAQRPSKFGHRQMVNGILKFKTTSTGKPLLSVGTLSPSVVPFGSEGRLMYSEITKIIYLYLRSTSWHALPLTGLFVLGPPTSISWIVQRAVSRPGEFPCGASNRCPKDCVTGVYTDLFPLGSRYEYAATVYLNSETYRVNPTLALINQTNIIASKKVTTESQRAGYTTTTCFVFKLRVWCISVVELAPSTMTAYEPIPFLYQLDLTCKGKNGSLAMRFAGKEGTYKSGRYKSPRNECFFEKVSNKYYFIVSTPEGIQPYEIRDLTPDRMPHIIMYISDVCAPALSAFKKLLPAMRPITTLTIGNWQFRPVEVSGGLRVNIGRNLTKEGDLTMSAPEDPGSNTFPGNHIPGNGILDAGYYTVEYPKE

SEQ ID NO: 107 - protein, 582 aa, Mapuera virus
  MISC_FEATURE: attachment protein
MASLQSEPGSQKPHYQSDDQLVKRTWRSFFRFSVLVVTITSLALSIITLIGVNRISTAKQISNAFAAIQANILSSIPDIRPINSLLNQLVYTSSVTLPLRISSLESNVLAAIQEACTYRDSQSSCSATMSVMNDQRYIEGIQVYSGSFLDLQKHTLSPPIAFPSFIPTSTTTVGCTRIPSFSLTKTHWCYTHNYIKTGCRDATQSNQYIALGTIYTDPDGTPGFSTSRSQYLNDGVNRKSCSISAVPMGCALYCFISVKEEVDYYKGTVPPAQTLILFFFNGTVHEHRIVPSSMNSEWVMLSPGVGSGVFYNNYIIFPLYGGMTKDKAEKRGELTRFFTPKNSRSLCKMNDSVFSNAAQSAYYPPYFSSRWIRSGLLACNWNQIITTNCEILTFSNQVMMMGAEGRLILINDDLFYYQRSTSWWPRPLVYKLDIELNYPDSHIQRVDQVEVTFPTRPGWGGCVGNNFCPMICVSGVYQDVWPVTNPVNTTDSRTLWVGGTLLSNTTRENPASVVTSGGSISQTVSWFNQTVPGAYSTTTCFNDQVQGRIFCLIIFEVGGGLLGEYQIVPFLKELKYQGAVHA

SEQ ID NO: 108 - protein, 657 aa, Nariva virus
  MISC_FEATURE: attachment protein
MAPINYPASYYTNNAERPVVITTKSTESKGQRPLPLGNARFWEYFGHVCGTLTFCMSLIGIIVGIIALANYSSDKDWKGRIGGDIQVTRMATEKTVKLILEDTTPKLRNILDSVLFQLPKMLASIASKINTQTPPPPTTSGHSTALATQCSSNCENRPEIGYDYLRQVEQSLQRITNISIQLLEASEIHSMAGAYPNALYKIRTQDSWSVTAKECPLQAFQPNLNLIPAMIGTATGALIRNCVRQPVIVVDDGVYMLTYLAMRGSCQDHQKSVRHFEMGVITSDPFGDPVPTPLRHWTKRALPAYDGCALAVKGHAGFALCTETSVGPLRDRTAKRKPNIVLFKASLVGELSERVIPPQSWLSGFSFFSVYTVAGKGYAYHSKFHAFGNVVRVGQSEYQAKCRGTGCPTANQDDCNTAQRVSQEDNTYLHQAILSVDIDSVIDPEDVVYVIERDQYYQASAGDLYRVPETGEILYNLHNGGWSNEVQVGRIQPSDRFYMREIQLTSTRVPAPNGCNRVKGCPGGCVAVISPAFTPMHPEFNVGVGIFPMNQPHNPSIMHVQQQTELFWKPIVGGNITLHESSIACYSTVPPNPSYDLCIGVMTLLLHQGQLPQFQALSWYQPTMCNGNAPQNRRALIPVIVEDSKAMSVSSDAPRTP

SEQ ID NO: 109 - protein, 632 aa, Bat paramyxovirus Eid_hel/GH-M74a/GHA/2009
  MISC_FEATURE: glycoprotein
MPQKTVEFINMNSPLERGVSTLSDKKTLNQSKITKQGYFGLGSHSERNWKKQKNQNDHYMTVSTMILEILVVLGIMFNLIVLTMVYYQNDNINQRMAELTSNITVLNLNLNQLTNKIQREIIPRITLIDTATTITIPSAITYILATLTTRISELLPSINQKCEFKTPTLVLNDCRINCTPPLNPSDGVKMSSLATNLVAHGPSPCRNFSSVPTIYYYRIPGLYNRTALDERCILNPRLTISSTKFAYVHSEYDKNCTRGFKYYELMTFGEILEGPEKEPRMFSRSFYSPTNAVNYHSCTPIVTVNEGYFLCLECTSSDPLYKANLSNSTFHLVILRHNKDEKIVSMPSFNLSTDQEYVQIIPAEGGGTAESGNLYFPCIGRLLHKRVTHPLCKKSNCSRTDDESCLKSYYNQGSPQHQVVNCLIRIRNAQRDNPTWDVITVDLTNTYPGSRSRIFGSFSKPMLYQSSVSWHTLLQVAEITDLDKYQLDWLDTPYISRPGGSECPFGNYCPTVCWEGTYNDVYSLTPNNDLFVTVYLKSEQVAENPYFAIFSRDQILKEFPLDAWISSARTTTISCFMFNNEIWCIAALEITRLNDDIIRPIYYSFWLPTDCRTPYPHTGKMTRVPLRSTYNY

SEQ ID NO: 110 - protein, 569 aa, Avian paramyxovirus 7
  MISC_FEATURE: hemagglutinin-neuraminidase
MESIGKGTWRTVYRVLTILLDVVIIILSVIALISLGLKPGERIINEVNGSIHNQLVPLSGITSDIQAKVSSIYRSNLLSIPLQLDQINQAISSSARQIADTINSFLALNGSGTFIYTNSPEFANGFNRAMFPTLNQSLNMLTPGNLIEFTNFIPTPTTKSGCIRIPSFSMSSSHWCYTHNIIASGCQDHSTSSEYISMGVVEVTDQAYPNFRTTLSITLADNLNRKSCSIAATGFGCDILCSVVTETENDDYQSPEPTQMIYGRLFFNGTYSEMSLNVNQMFADWVANYPAVGSGVELADFVIFPLYGGVKITSTLGASLSQYYYIPKVPTVNCSETDAQQIEKAKASYSPPKVAPNIWAQAVVRCNKSVNLANSCEILTFNTSTMMMGAEGRLLMIGKNVYFYQRSSSYWPVGIIYKLDLQELTTFSSNQLLSTIPIPFEKFPRPASTAGVCSKPNVCPAVCQTGVYQDLWVLYDLGKLENTTAVGLYLNSAVGRMNPFIGIANTLSWYNTTRLFAQGTPASYSTTTCFKNTKIDTAYCLSILELSDSLLGSWRITPLLYNITLSIMS

SEQ ID NO: 111 - protein, 588 aa, Tuhoko virus
  MISC_FEATURE: hemagglutinin-neuraminidase
MPPVPTVSQSIDEGSFTDIPLSPDDIKHPLSKKTCRKLFRIVTLIGVGLISILTIISLAQQTGILRKVDSSDFQSYVQESFKQVLNLMKQFSSNLNSLIEITSVTLPFRIDQFGTDIKTQVAQLVRQCNAVCRGPIKGPTTQNIVYPALYETSLNKTLETKNVRIQEVRQEVDPVPGPGLSNGCTRNPSFSVYHGVWCYTHATSIGNCNGSLGTSQLFRIGNVLEGDGGAPYHKSLATHLLTTRNVSRQCSATASYYGCYFICSEPVLTERDDYETPGIEPITIFRLDPDGNWVVFPNINRFTEYSLKALYPGIGSGVLFQGKLIFPMYGGIDKERLSALGLGNIGLIERRMADTCNHTEKELGRSFPGAFSSPYYHDAVMLNFLLICEMIENLPGDCDLQILNPTNMSMGSESQLSVLDNELFLYQRSASWWPYTLIYRLNMRYTGKYLKPKSIIPMVIKSNTRPGYEGCNHERVCPKVCVTGVFQAPWILSIGRDHKERVSNVTYMVAWSMDKSDRTYPAVSVCGSDTCKLTVPLGDSKVHSAYSVTRCYLSRDHMSAYCLVIFELDARPWAEMRIQSFLYKLILT

SEQ ID NO: 112 - protein, 582 aa, Tuhoko virus 3
  MISC_FEATURE: hemagglutinin-neuraminidase
MHNRTQSVSSIDTSSDVYLPRRKKAVTKFTFKKIFRVLILTLLLSIIIIIAVIFPKIDHIRETCDNSQILETITNQNSEIKNLINSAITNLNVLLTSTTVDLPIKLNNFGKSIVDQVTMMVRQCNAVCRGPGDRPTQNIELFKGLYHTSPPSNTSTKLSMITEASNPDDIVPRPGKLLGCTRFPSFSVHYGLWCYGHMASTGNCSGSSPSVQIIRIGSIGTNKDGTPKYVIIASASLPETTRLYHCSVTMTSIGCYILCTTPSVSETDDYSTMGIEKMSISFLSLDGYLTQLGQPTGLDNQNLYALYPGPGSGVIFRDFLIFPMMGGIRLMDAQKMLNRNITYRGFPPSETCTESELKLKQEVANMLTSPYYGEVLVLNFLYVCSLLDNIPGDCSVQLIPPDNMTLGAESRLYVLNGSLIMYKRGSSWWPYTELYQINYRVNNRAFRVRESVRINTTSTSRPGVQGCNLEKVCPKVCVSGIYQSPGIISAPVNPTRQEEGLLYFLVWTSSMSSRTGPLSSLCDHSTCRITYPIGDDTIFIGYTDSSCFMSSIKEGIYCIAFLELDNQPYSMMAIRSLSYIIN

SEQ ID NO: 113 - protein, 625 aa, Mojiang virus
  MISC_FEATURE: attachment glycoprotein
MATNRDNTITSAEVSQEDKVKKYYGVETAEKVADSISGNKVFILMNTLLILTGAIITITLNITNLTAAKSQQNMLKIIQDDVNAKLEMFVNLDQLVKGEIKPKVSLINTAVSVSIPGQISNLQTKFLQKYVYLEESITKQCTCNPLSGIFPTSGPTYPPTDKPDDDTTDDDKVDTTIKPIEYPKPDGCNRTGDHFTMEPGANFYTVPNLGPASSNSDECYTNPSFSIGSSIYMFSQEIRKTDCTAGEILSIQIVLGRIVDKGQQGPQASPLLVWAVPNPKIINSCAVAAGDEMGWVLCSVTLTAASGEPIPHMFDGFWLYKLEPDTEVVSYRITGYAYLLDKQYDSVFIGKGGGIQKGNDLYFQMYGLSRNRQSFKALCEHGSCLGTGGGGYQVLCDRAVMSFGSEESLITNAYLKVNDLASGKPVIIGQTFPPSDSYKGSNGRMYTIGDKYGLYLAPSSWNRYLRFGITPDISVRSTTWLKSQDPIMKILSTCTNTDRDMCPEICNTRGYQDIFPLSEDSEYYTYIGITPNNGGTKNFVAVRDSDGHIASIDILQNYYSITSATISCFMYKDEIWCIAITEGKKQKDNPQRIYAHSYKIRQMCYNMKSATVTVGNAKNITIRRY

SEQ ID NO: 114 - protein, 614 aa, Avian paramyxovirus 12
  MISC_FEATURE: hemagglutinin neuraminidase
MESATSQVSFENDKTSDRRTWRAVFRVLMIILALSSLCVTVAALIYSAKAAIPGNIDASEQRILSSVEAVQVPVSRLEDTSQKIYRQVILEAPVTQLNMETNILNAITSLSYQIDASANSSGCGAPVHDSDFTGGVGRELLQEAEVNLTIIRPSKFLEHLNFIPAPTTGNGCTRIPSFDLGQTHWCYTHNVVLNGCRDRGHSFQYVALGILRTSATGSVFLSTLRSVNLDDDRNRKSCSVSATPIGCEMLCSLVTETEEGDYDSIDPTPMVHGRLGFDGKYREVDLSEKEIFADWRANYPAVGGGAFFGNRVWFPVYGGLKEGTQSERDAEKGYAIYKRFNNTCPDDNTTQIANAKASYRPSRFGGRFIQQGILSFKVEGNLGSDPILSLTDNSITLMGAEARVMNIENKLYLYQRGTSWFPSALVYPLDVANTAVKVRAPYIFDKFTRPGGHPCSASSRCPNVCVTGVYTDAYPLVFSRSHDIVAVYGMQLAAGTARLDPQAAIWYGNEMSTPTKVSSSTTKAAYTTSTCFKVTKTKRIYCISIAEIGNTLFGEFRIVPLLIEVQKTPLTRRSELRQQMPQPPIDLVIDNPFCAPSGNLSRKNAIDEYANSWP

SEQ ID NO: 115 - protein, 577 aa, avian-paramyxovirus 3
  MISC_FEATURE: hemagglutinin
MEPTGSKVDIVPSQGTKRTCRTFYRLLILILNLIIIILTIISIYVSISTDQHKLCNNEADSLLHSIVEPITVPLGTDSDVEDELREIRRDTGINIPIQIDNTENIILTTLASINSNIARLHNATDESPTCLSPVNDPRFIAGINKITKGSMIYRNFSNLIEHVNFIPSPTTLSGCTRIPSFSLSKTHWCYSHNVISTGCQDHAASSQYISIGIVDTGLNNEPYLRTMSSRLLNDGLNRKSCSVTAGAGVCWLLCSVVTESESADYRSRAPTAMILGRFNFYGDYTESPVPASLFSGRFTANYPGVGSGTQLNGTLYFPIYGGVVNDSDIELSNRGKSFRPRNPTNPCPDPEVTQSQRAQASYYPTRFGRLLIQQAILACRISDTTCTDYYLLYFDNNQVMMGAEARIYYLNNQMYLYQRSSSWWPHPLFYRFSLPHCEPMSVCMITDTHLILTYATSRPGTSICTGASRCPNNCVDGVYTDVWPLTEGTTQDPDSYYTVFLNSPNRRISPTISIYSYNQKISSRLAVGSEIGAAYTTSTCFSRTDTGALYCITIIEAVNTIFGQYRIVPILVQLISD

SEQ ID NO: 116 - protein, 620 aa, Salem virus
  MISC_FEATURE: attachment glycoprotein
MKAMHYYKNDFADPGTNDNSSDLTTNPFISNQIKSNLSPPVLAEGHLSPSPIPKFRKILLTISFVSTIVVLTVILLVLTIRILTIIEASAGDEKDIHTILSSLLNTFMNEYIPVFKNLVSIISLQIPQMLIDLKTSSTQMMQSLKTFPRDLETLSTVTQSVAVLLEKAKSTIPDINKFYKNVGKVTFNDPNIKVLTLEVPAWLPIVRQCLKQDFRQVISNSTGFALIGALPSQLFNEFEGYPSLAIVSEVYAITYLKGVMFENQENFLYQYFEIGTISPDGYNKPYFLRHTSVMLSTFKLSGKCTAAVDYRGGIFLCTPSPKIPKILQNPPDLPTLTVVSIPFDGRYTIRNISLMLTDEADIIYDLDTLQGRGVLQAMRFYALVRVISSSSPRHFPFCKNSWCPTADDKICDQSRRLGADGNYPVMYGLISIPAHSSYQGNVSLKLIDPKYYAYTRDASLFYNSMTDTYHYSFGTRGWVSRPIIGELLLGDDIVLTRYTVRSVSRATAGDCTTVSMCPQACSGGMNSIFYPLNFDKPQVTGVAIRQYERQQEGIIVVTMNDHYYYSVPIIKNGTLLISSVTDCFWLMGDLWCMSLMEKNNLPLGVRSLAHLTWNIHWSCS

SEQ ID NO: 117 - protein, 579 aa, Avian paramyxovirus 9
  MISC_FEATURE: hemagglutinin-neuraminidase
MESGISQASLVNDNIELRNTWRTAFRVVSLLLGFTSLVLTACALHFALNAATPADLSSIPVAVDQSHHEILQTLSLMSDIGNKIYKQVALDSPVALLNTESTLMSAITSLSYQINNAANNSGCGAPVHDKDFINGVAKELFVGSQYNASNYRPSRFLEHLNFIPAPTTGKGCTRIPSFDLAATHWCYTHNVILNGCNDHAQSYQYISLGILKVSATGNVFLSTLRSINLDDDENRKSCSISATPLGCDLLCAKVTEREEADYNSDAATRLVHGRLGFDGVYHEQALPVESLFSDWVANYPSVGGGSYFDNRVWFGVYGGIRPGSQTDLLQSEKYAIYRRYNNTCPDNNPTQIERAKSSYRPQRFGQRLVQQAILSIRVEPSLGNDPKLSVLDNTVVLMGAEARIMTFGHVALMYQRGSSYFPSALLYPLSLTNGSAAASKPFIFEQYTRPGSPPCQATARCPNSCVTGVYTDAYPLFWSEDHKVNGVYGMMLDDITSRLNPVAAIFDRYGRSRVTRVSSSSTKAAYTTNTCFKVVKTKRVYCLSIAEIENTLFGEFRITPLLSEIIFDPNLEPSDTSRN

SEQ ID NO: 118 - protein, 595 aa, Achimota virus
  MISC_FEATURE: attachment protein
MATNLSTITNGKFSQNSDEGSLTELPFFEHNRKVATTKRTCRFVFRSVITLCNLTILIVTVVVLFQQAGFIKRTESNQVCETLQNDMHGVVTMSKGVITTLNNLIEITSVNLPFQMKQFGQGIVTQVTQMVRQCNAVCKGPTIGPDIQNIVYPASYESMIKHPVNNSNILLSEIRQPLNFVPNTGKLNGCTRTPSFSVYNGFWCYTHAESDWNCNGSSPYMQVFRVGVVTSDYDYNVIHKTLHTKTSRLANVTYQCSTISTGYECYFLCSTPNVDEITDYKTPGIESLQIYKIDNRGTFAKFPITDQLNKELLTALYPGPGNGVLYQGRLLFPMHGGMQSSELNKVNLNNTVLSQFNDNKGCNATEIKLESEFPGTFTSPYYSNQVMLNYILICEMIENLPGNCDLQIVAPKNMSMGSESQLYSINNKLYLYQRSSSRWPYPLIYEVGTRLTNRQFRLRAINRFLIKSTTRPGSEGCNIYRVCPKVCVTGVYQAPWILHVSKAGSQSIAKVLYAVAWSKDHMSRKGPLFSICDNDTCFLTKSLASEHVHSGYSITRCYLENSERHIICVVIMELDASPWAEMRIQSVIYNITLPS

SEQ ID NO: 119 - protein, 583 aa, Achimota virus 2
  MISC_FEATURE: attachment protein
MDNSMSISTISLDAQPRIWSRHESRRTWRNIFRITSLVLLGVTVIICIWLCCEVARESELELLASPLGALIMAINTIKSSVVKMTTELNQVTFTTSIILPNKVDQFGQNVVSQVAQLVKQCNAVCRGHQDTPELEQFINQKNPTWILQPNYTTKLTNLHEIDSIIPLVDYPGFSKSCTRFPSFSEGSKFWCFTYAVVKEPCSDISSSIQVVKYGAIKANHSDGNPYLVLGTKVLDDGKFRRGCSITSSLYGCYLLCSTANVSEVNDYAHTPAYPLTLELISKDGITTDLSPTYTVQLDKWSALYPGIGSGVIFKGYLMFPVYGGLPFKSPLISASWVGPGNKWPVDFSCSEDQYSTFNFSNPYSALYSPHFSNNIVVSALFVCPLNENLPYSCEVQVLPQGNLTIGAEGRLYVIDQDLYYYQRSTSWWPYLQLYKLNIRITNRVFRVRSLSLLPIKSTTRPGYGNCTYFKLCPHICVTGVYQSPWLISIRDKRPHEEKNILYFIGWSPDEQIRQNPLVSLCHETACFINRSLATNKTHAGYSESHCVQSFERNKLTCTVFYELTAKPWAEMRVQSLLFQVDFL

SEQ ID NO: 120 - protein, 580 aa, Tuhoko virus 1
  MISC_FEATURE: hemagglutinin-neuraminidase
MDSRSDSFTDIPLDNRIERTVTSKKTWRSIFRVTAIILLIICVVVSSISLNQHNDAPLNGAGNQATSGFMDAIKSLEKLMSQTINELNQVVMTTSVQLPNRITKFGQDILDQVTQMVRQCNAVCRGPGVGPSIQNYVIQGHAPTVSFDPISAEYQKFVFGITEKTLITAYHNPWECLRFPSQHLFDTTWCVSYQILTQNCSDHGPRITVIQLGEIMIANNLSTVFRDPVIKYIRHHIWLRSCSVVAYYSQCTIFCTSTNKSEPSDYADTGYEQLFLATLQSDGTFTEHSMHGVNIVHQWNAIYGGVGNGVIIGRNMLIPLYGGINYYDHNTTIVQTVDLRPYPIPDSCSQTDNYQTNYLPSMFTNSYYGTNLVVSGYLSCRLMAGTPTSCSIRVIPIENMTMGSEGQFYLINNQLYYYKRSSNWIRDTQVYLLSYSDKGNIIEITSAERYIFKSVTSPDEGDCVTNHGCPSNCIGGLFQAPWILNDFKLCGSNITCPKIVTVWADQPDKRSNPMLSIAETDKLLLHKSYINYHTAVGYSTVLCFDSPKLNLKTCVVLQELMSDDKLLIRISYSIVSIMVE

SEQ ID NO: 121 - protein, 607 aa, Phocine distemper virus
MFSHQDKVGAFYKNNARANSSKLSLVTDEVEERRSPWFLSILLILLVGILILLAITGIRFHQVVKSNLEFNKLLIEDMEKTKAVHHQVKDVLTPLFKIIGDEVGLRLPQKLNEIKQFIVQKTNFFNPNREFDFRELHWCINPPSKVKVNFTQYCEITEFKEATRSVANSILLLTLYRGRDDIFPPYKCRGATTSMGNVFPLAVSLSMSLISKPSEVINMLTAISEGIYGKTYLLVTDDTEENFETPEIRVFEIGFINRWLGDMPLFQTTNYRIISNNSNTKICTIAVGELALASLCTKESTILLNLGDEESQNSVLVVILGLFGATHMDQLEEVIPVAHPSIEKIHITNHRGFIKDSVATWMVPALALSEQGEQINCLRSACKRRTYPMCNQTSWEPFGDKRLPSYGRLTLSLDVSTDLSINVSVAQGPIIFNGDGMDYYEGTLLNSGWLTIPPKNGTILGLINQASKGDQFIVTPHILTFAPRESSTDCHLPIQTYQIQDDDVLLESNLVVLPTQSFEYVVATYDVSRSDHAIVYYVYDPARTVSYTYPFRLRTKGRPDILRIECFVWDGHLWCHQFYRFQLDATNSTSVVENLIRIRFSCDRLDP

SEQ ID NO: 122 - protein, 574 aa, Caprine parainfluenza virus 3
  MISC_FEATURE: hemagglutinin-neuraminidase
MEYWGHTNNPDKINRKVGVDQVRDRSKTLKIITFIISMMTSIMSTVALILILIMFIQNNNNNRIILQELRDETDAIEARIQKASNDIGVSIQSGINTRLLTIQNHVQNYIPLALTQQVSSLRESINDVITKREETQSKMPIQRMTHDDGIEPLIPDNFWKCPSGIPTISASPKIRLIPGPGLLATSTTINGCIRLPSLVINNLIYAYTSNLITQGCQDIGKSYQVLQIGIITINSDLVPDLNPRITHTFDIDDNRKSCSLALRNADVYQLCSTPKVDERSDYSSIGIEDIVLDIVTSEGTVSTTRFTNNNITFDKPYAALYPSVGPGIYYDNKIIFLGYGGLEHEENGDVICNITGCPGKTQHDCNQASYSPWFSNRRMVNAIILVNKGLNKVPSLQVWTIPMRQNYWGSEGRLLLLGNKIYIYTRSTSWHSKLQLGTLDISNYNDIRIRWTHHDVLSRPGSEECPWGNTCPRGCITGVYNDAYPLNPSGSVVSSVILDSRTSRENPIITYSTDTSRVNELAIRNNTLSAAYTTTNCVTHYGKGYCFHIIEINHKSLNTLQPMLFKTEIPKSCN

SEQ ID NO: 123 - protein, 414 aa, Avian metapneumovirus
  MISC_FEATURE: attachment glycoprotein
MGSELYIIEGVSSSEIVLKQVLRRSKKILLGLVLSALGLTLTSTIVISICISVEQVKLRQCVDTYWAENGSLHPGQSTENTSTRGKTTTKDPRRLQATGAGKFESCGYVQVVDGDMHDRSYAVLGGVDCLGLLALCESGPICQGDTWSEDGNFCRCTFSSHGVSCCKKPKSKATTAQRNSKPANSKSTPPVHSDRASKEHNPSQGEQPRRGPTSSKTTIASTPSTEDTAKPTISKPKLTIRPSQRGPSGSTKAASSTPSHKTNTRGTSKTTDQRPRTGPTPERPRQTHSTATPPPTTPIHKGRAPTPKPTTDLKVNPREGSTSPTAIQKNPTTQSNLVDCTLSDPDEPQRICYQVGTYNPSQSGTCNIEVPKCSTYGHACMATLYDTPFNCWRRTRRCICDSGGELIEWCCTSQ

SEQ ID NO: 124 - protein, 665 aa, Tupaia paramyxovirus
  MISC_FEATURE: hemagglutinin
MDYHSHTTQTGSNETLYQDPLQSQSGSRDTLDGPPSTLQHYSNPPPYSEEDQGIDGPQRSQPLSTPHQYDRYYGVNIQHTRVYNHLGTIYKGLKLAFQILGWVSVIITMIITVTTLKKMSDGNSQDSAMLKSLDENFDAIQEVANLLDNEVRPKLGVTMTQTTFQLPKELSEIKRYLLRLERNCPVCGTEATPQGSKGNASGDTAFCPPCLTRQCSEDSTHDQGPGVEGTSRNHKGKINFPHILQSDDCGRSDNLIVYSINLVPGLSFIQLPSGTKHCIIDVSYTFSDTLAGYLIVGGVDGCQLHNKAIIYLSLGYYKTKMIYPPDYIAIATYTYDLVPNLRDCSIAVNQTSLAAICTSKKTKENQDFSTSGVHPFYIFTLNTDGIFTVTVIEQSQLKLDYQYAALYPATGPGIFIGDHLVFLMWGGLMTKAEGDAYCQASGCNDAHRTSCNIAQMPSAYGHRQLVNGLLMLPIKELGSHLIQPSLETISPKINWAGGHGRLYYNWEINTTYIYIEGKTWRSRPNLGIISWSKPLSIRWIDHSVARRPGARPCDSANDCPEDCLVGGYYDMFPMSSDYKTAITIIPTHHQWPSSPALKLFNTNREVRVVMILRPPNNVKKTTISCIRIMQTNWCLGFIIFKEGNNAWGQIYSYIYQVESTCPNTK

SEQ ID NO: 125 - protein, 585 aa, Avian metapneumovirus
  MISC_FEATURE: attachment glycoprotein
MEVKVENVGKSQELKVKVKNFIKRSDCKKKLFALILGLVSFELTMNIMLSVMYVESNEALSLCRIQGTPAPRDNKTNTENATKETTLHTTTTTRDPEVRETKTTKPQANEGATNPSRNLTTKGDKHQTTRATTEAELEKQSKQTTEPGTSTQKHTPTRPSSKSPTTTQAIAQLTTPTTPKASTAPKNRQATTKKTETDTTTASRARNTNNPTETATTTPKATTETGKSKEGPTQHTTKEQPETTAGETTTPQPRRTASRPAPTTKIEEEAETTKTRTTKSTQTSTGPPRPTGGAPSGAATEGSGRAAAAGGPSAASAGGRRRTEAAAERDRRTRAGAGPTAGGARARTAAASERGADTAGSAGGGPGGDGATGGLSGGAPAEREDASGGTAAAGPGDGTEADGRAPPAAALAGRTTESAAGAAGDSGRAGTAGWGSAADGRSTGGNAAAEAGAAQSGRAAPRQPSGGTAPESTAPPNSGGSGRADAAPTEEVGVGSGLWRGRYVCGPCGESVPEHPMNPCFGDGTAWICSDDGGSLPAGCYDGGTDGVVCCGVCGGNSCCCGRVECTCGGGAGLLSCCCGSYSWS

SEQ ID NO: 126 - protein, 577 aa, Avian paramyxovirus 3
  MISC_FEATURE: hemagglutinin-neuraminidase protein
MESPPSGKDAPAFREPKRTCRLCYRATTLSLNLTIVVLSIISIYVSTQTGANNSCVNPTIVTPDYLTGSTTGSVEDLADLESQLREIRRDTGINLPVQIDNTENLILTTLASINSNLRFLQNATTESQTCLSPVNDPRFVAGINRIPAGSMAYNDFSNLIEHVNFIPSPTTLSGCTRIPSFSLSKTHWCYTHNVISNGCLDHAASSQYISIGIVDTGLNNEPYFRTMSSKSLNDGLNRKSCSVTAAANACWLLCSVVTEYEAADYRSRTPTAMVLGRFDFNGEYTEIAVPSSLFDGRFASNYPGVGSGTQVNGTLYFPLYGGVLNGSDIETANKGKSFRPQNPKNRCPDSEAIQSFRAQDSYYPTRFGKVLIQQAIIACRISNKSCTDFYLLYFDNNRVMMGAEARLYYLNNQLYLYQRSSSWWPHPLFYSISLPSCQALAVCQITEAHLTLTYATSRPGMSICTGASRCPNNCVDGVYTDVWPLTKNDAQDPNLFYTVYLNNSTRRISPTISLYTYDRRIKSKLAVGSDIGAAYTTSTCFGRSDTGAVYCLTIMETVNTIFGQYRIVPILLRVTSR

SEQ ID NO: 127 - protein, 585 aa, Avian metapneumovirus
  MISC_FEATURE: attachment glycoprotein
MEVKVENVGKSQELKVKVKNFIKRSDCKKKLFALILGLVSFELTMNIMLSVMYVESNEALSLCRIQGTPAPRDNKTNTENATKETTLHTTTTTRDPEVRETKTTKPQANEGATNPSRNLTTKGDKHQTTRATTEAELEKQSKQTTEPGTSTQKHTPARPSSKSPTTTQATAQPTTPTAPKASTAPKNRQATTKKTETDTTTASRARNTNNPTETATTTPKATTETGKGKEGPTQHTTKEQPETTARETTTPQPRRTASRPAPTTKIEEEAETTKTRTTKNTQTSTGPPRPTRSTPSKTATENNKRTTTTKRPNTASTDSRQQTRTTAEQDQQTQTRAKPTTNGAHPQTTTTPEHNTDTTNSTKGSPKEDKTTRDPSSKTPTEQEDASKGTAAANPGGSAEADRRAPPATTPTGRTTESAAGTTGDDSGAETTRRRSAADRRPTGGSTAAEAGTAQSGRATPKQPSGGTAAGNTAPPNNESSGRADAAPAEEAGVGPSIRRGRHACGPRRESAPEHPTNPCPGDGTAWTRSDGGGNLPAGRHDSGADGAARRGARGGNPRRRGRAERTRGGGAGPPSCRCGSHNRS

SEQ ID NO: 128 - protein, 389 aa, Avian metapneumovirus type D
  MISC_FEATURE: attachment glycoprotein
MGAKLYAISGASDAQLMKKTCAKLLEKVVPIIILAVLGITGTTTIALSISISIERAVLSDCTTQLRNGTTSGSLSNPTRSTTSTAVTTRDIRGLQTTRTRELKSCSNVQIAYGYLHDSSNPVLDSIGCLGLLALCESGPFCQRNYNPRDRPKCRCTLRGKDISCCKEPPTAVTTSKTTPWGTEVHPTYPTQVTPQSQPATMAHQTATANQRSSTTEPVGSQGNTTSSNPEQQTEPPPSPQHPPTTTSQDQSTETADGQEHTPTRKTPTATSNRRSPTPKRQETGRATPRNTATTQSGSSPPHSSPPGVDANMEGQCKELQAPKPNSVCKGLDIYREALPRGCDKVLPLCKTSTIMCVDAYYSKPPICFGYNQRCFCMETFGPIEFCCKS

SEQ ID NO: 129 - protein, 197 aa, Respiratory syncytial virus
  MISC_FEATURE: attachment glycoprotein
MSKNKNQRTARTLEKTWDTLNHLIVISSCLYKLNLKSIAQIALSVLAMIISTSLIIAAIIFIISANHKVTLTTVTVQTIKNHTEKNITTYLTQVSPERVSPSKQPTTTPPIHTNSATISPNTKSEIHHTTAQTKGRTSTPTQNNKPNTKPRPKNPPKKDDYHFEVFNFVPCSICGNNQLCKSICKTIPSNKPRKNQP

SEQ ID NO: 130 - protein, 580 aa, Avian paramyxovirus 14
  MISC_FEATURE: hemagglutinin-neuraminidase protein
MEGSRTVIYQGDPNEKNTWRLVFRTLTLILNLAILSVTIASIIITSKITLSEVTTLKTEGVEEVITPLMATLSDSVQQEKMIYKEVAISIPLVLDKIQTDVGTSVAQITDALRQIQGVNGTQAFALSNAPEYSGGIEVPLFQIDSFVNKSMSISGLLEHASFIPSPTTLHGCTRIPSFHLGPRHWCYTHNIIGSRCRDEGFSSMYISIGAITVNRDGNPLFITTASTILADDNNRKSCSIIASSYGCDLLCSIVTESENDDYANPNPTKMVHGRFLYNGSYVEQALPNSLFQDKWVAQYPGVGSGITTHGKVLFPIYGGIKKNTQLFYELSKYGFFAHNKELECKNMTEEQIRDIKAAYLPSKTSGNLFAQGIIYCNISKLGDCNVAVLNTSTTMMGAEGRLQMMGEYVYYYQRSSSWWPVGIVYKKSLAELMNGINMEVLSFEPIPLSKFPRPTWTAGLCQKPSICPDVCVTGVYTDLFSVTIGSTTDKDTYFGVYLDSATERKDPWVAAADQYEWRNRVRLFESTTEAAYTTSTCFKNTVNNRVFCVSIVELRENLLGDWKIVPLLFQIGVSQGPPPK

SEQ ID NO: 131 - protein, 1046 aa, Beilong virus
  MISC_FEATURE: attachment glycoprotein
MSQLAAHNLAMSNFYGTHQGDLSGSQKGEEQQVQGVIRYVSMIVGLLSLFTIIALNVTNIIYMTESGGTMQSIKTAQGSIDGSMREISGVIMEDVKPKTDLINSMVSYNIPAQLSMIHQIIKNDVLKQCTPSFMFNNTICPLAENPTHSRYFEEVNLDSISECSGPDMHLGLGVNPEFIEFPSFAPGSTKPGSCVRLPSFSLSTTVFAYTHTIMGHGCSELDVGDHYFSVGRIADAGHEIPQFETISSWFINDKINRRSCTVAAGAMEAWMGCVIMTETFYDDLNSLDTGKLTISYLDVFGRKKEWIYTRSEILYDYTYTSVYFSVGSGVVVGDTVYFLIWGSLSSPIEETAYCFAPDCSNYNQRMCNEAQRPSKFGHRQMVNGILKFKTTSTGKPLLSVGTLSPSVVPFGSEGRLMYSEITKIIYLYLRSTSWHALPLTGLFVLGPPTSISWIVQRAVSRPGEFPCGASNRCPKDCVTGVYTDLFPLGSRYEYAATVYLNSETYRVNPTLALINQTNIIASKKVTTESQRAGYTTTTCFVFKLRVWCISVVELAPSTMTAYEPIPFLYQLDLTCKGKNGSLAMRFTGKEGTYKSGRYKSPRNECFFEKVSNKYYFIVSTPEGIQPYEIRDLTPDRMPHIIMYISDVCAPALSAFKKLLPAMRPITTLTIGNWQFRPVEVSGGLRVSIGRNLTKEGDLTMSAPEDPGSNTFPGGHIPGNGLFDAGYYTVEYPKEWKQTTPKPSEGGNIIDKNKTPVIPSRDNPTSDSSIPHRESIEPVRPTREVLKSSDYVTIVSTDSGSGSGDFATGVPWTGVSPKAPQNGINLPGTELPHPTVLDRINTPAPSDPKVSADSDHTRDTIDPTALSKPLNHDTTGDTDTRINTGTATYGFTPGREATSSGKLANDLTNSTSVPSEAHPSASTSEASKPEKNTDNRVTQDPTSGTAERPTTNAPVDGKHSTQLTDARPNTADPERTSQHSSSTTRDEVKPSLPSTTEASTHQRTEAATPPELVNNTLNPPSTQVRSVRSLMQDAIAQAWNFVRGVTP

SEQ ID NO: 132 - protein, 618 aa, Avian paramyxovirus UPO216
  MISC_FEATURE: hemagglutinin-neuraminidase protein
MERGISEVALANDRTEEKNTWRLIFRITVLVVSVITLGLTAASLVYSMNAAQPADFDGIIPAVQQVGTSLTNSIGGMQDVLDRTYKQVALESPLTLLNMESTIMNAITSLSYKINNGGNSSGCGAPIHDPEYIGGIGKELLIDDNVDVTSFYPSAFKEHLNFIPAPTTGAGCTRIPSFDLSATHYCYTHNVILSGCQDHSHSHQYIALGVLKLSDTGNVFFSTLRSINLDDTANRKSCSISATPLGCDILCSKVTETELEDYKSEEPTPMVHGRLSFDGTYSEKDLDVNNLFSDWTANYPSVGGGSYIGNRVWYAVYGGLKPGSNTDQSQRDKYVIYKRYNNTCPDPEDYQINKAKSSYTPSYFGSKRVQQAILSIAVSPTLGSDPVLTPLSNDVVLMGAEGRVMHIGGYTYLYQRGTSYYSPALLYPLNIQDKSATASSPYKFDAFTRPGSVPCQADARCPQSCVTGVYTDPYPLIFAKDHSIRGVYGMMLNDVTARLNPIAAVFSNISRSQITRVSSSSTKAAYTTSTCFKVIKTNRIYCMSIAEISNTLFGEFRIVPLLVEILSNGGNTARSAGGTPVKESPKGWSDAIAEPLFCTPTNVTRYNADIRRYAYSWP

SEQ ID NO: 133 - protein, 576 aa, Atlantic salmon paramyxovirus
  MISC_FEATURE: hemagglutinin-neuraminidase protein
MPPAPSPVHDPSSFYGSSLFNEDTASRKGTSEEIHLLGIRWNTVLIVLGLILAIIGIGIGASSFSASGITGNTTKEIRLIVEEMSYGLVRISDSVRQEISPKVTLLQNAVLSSIPALVTTETNTIINAVKNHCNSPPTPPPPTEAPLKKHETGMAPLDPTTYWTCTSGTPRFYSSPNATFIPGPSPLPHTATPGGCVRIPSMHIGSEIYAYTSNLIASGCQDIGKSYQNVQIGVLDRTPEGNPEMSPMLSHTFPINDNRKSCSIVTLKRAAYIYCSQPKVTEFVDYQTPGIEPMSLDHINANGTTKTWIYSPTEVVTDVPYASMYPSVGSGVVIDGKLVFLVYGGLLNGIQVPAMCLSPECPGIDQAACNASQYNQYLSGRQVVNGIATVDLMNGQKPHISVETISPSKNWFGAEGRLVYMGGRLYIYIRSTGWHSPIQIGVIYTMNPLAITWVTNTVLSRPGSAGCDWNNRCPKACLSGVYTDAYPISPDYNHLATMILHSTSTRSNPVMVYSSPTNMVNYAQLTTTAQIAGYTTTSCFTDNEVGYCATALELTPGTLSSVQPILVMTKIPKECV

SEQ ID NO: 134 - protein, 8797 aa, homo sapiens
  MISC_FEATURE: SYNE1
MATSRGASRCPRDIANVMQRLQDEQEIVQKRTFTKWINSHLAKRKPPMVVDDLFEDMKDGVKLLALLEVLSGQKLPCEQGRRMKRIHAVANIGTALKFLEGRKIKLVNINSTDIADGRPSIVLGLMWTIILYFQIEELTSNLPQLQSLSSSASSVDSIVSSETPSPPSKRKVTTKIQGNAKKALLKWVQYTAGKQTGIEVKDFGKSWRSGVAFHSVIHAIRPELVDLETVKGRSNRENLEDAFTIAETELGIPRLLDPEDVDVDKPDEKSIMTYVAQFLKHYPDIHNASTDGQEDDEILPGFPSFANSVQNFKREDRVIFKEMKVWIEQFERDLTRAQMVESNLQDKYQSFKHFRVQYEMKRKQIEHLIQPLHRDGKLSLDQALVKQSWDRVTSRLFDWHIQLDKSLPAPLGTIGAWLYRAEVALREEITVQQVHEETANTIQRKLEQHKDLLQNTDAHKRAFHEIYRTRSVNGIPVPPDQLEDMAERFHFVSSTSELHLMKMEFLELKYRLLSLLVLAESKLKSWIIKYGRRESVEQLLQNYVSFIENSKFFEQYEVTYQILKQTAEMYVKADGSVEEAENVMKFMNETTAQWRNLSVEVRSVRSMLEEVISNWDRYGNTVASLQAWLEDAEKMLNQSENAKKDFFRNLPHWIQQHTAMNDAGNFLIETCDEMVSRDLKQQLLLLNGRWRELFMEVKQYAQADEMDRMKKEYTDCVVTLSAFATEAHKKLSEPLEVSFMNVKLLIQDLEDIEQRVPVMDAQYKIITKTAHLITKESPQEEGKEMFATMSKLKEQLTKVKECYSPLLYESQQLLIPLEELEKQMTSFYDSLGKINEIITVLEREAQSSALFKQKHQELLACQENCKKTLTLIEKGSQSVQKFVTLSNVLKHFDQTRLQRQIADIHVAFQSMVKKTGDWKKHVETNSRLMKKFEESRAELEKVLRIAQEGLEEKGDPEELLRRHTEFFSQLDQRVLNAFLKACDELTDILPEQEQQGLQEAVRKLHKQWKDLQGEAPYHLLHLKIDVEKNRFLASVEECRTELDRETKLMPQEGSEKIIKEHRVFFSDKGPHHLCEKRLQLIEELCVKLPVRDPVRDTPGTCHVTLKELRAAIDSTYRKLMEDPDKWKDYTSRFSEFSSWISTNETQLKGIKGEAIDTANHGEVKRAVEEIRNGVTKRGETLSWLKSRLKVLTEVSSENEAQKQGDELAKLSSSFKALVTLLSEVEKMLSNFGDCVQYKEIVKNSLEELISGSKEVQEQAEKILDTENLFEAQQLLLHHQQKTKRISAKKRDVQQQIAQAQQGEGGLPDRGHEELRKLESTLDGLERSRERQERRIQVTLRKWERFETNKETVVRYLFQTGSSHERFLSFSSLESLSSELEQTKEFSKRTESIAVQAENLVKEASEIPLGPQNKQLLQQQAKSIKEQVKKLEDTLEEDIKTMEMVKTKWDHFGSNFETLSVWITEKEKELNALETSSSAMDMQISQIKVTIQEIESKLSSIVGLEEEAQSFAQFVTTGESARIKAKLTQIRRYGEELREHAQCLEGTILGHLSQQQKFEENLRKIQQSVSEFEDKLAVPIKICSSATETYKVLQEHMDLCQALESLSSAITAFSASARKVVNRDSCVQEAAALQQQYEDILRRAKERQTALENLLAHWQRLEKELSSFLTWLERGEAKASSPEMDISADRVKVEGELQLIQALQNEVVSQASFYSKLLQLKESLFSVASKDDVKMMKLHLEQLDERWRDLPQIINKRINFLQSVVAEHQQFDELLLSFSVWIKLFLSELQTTSEISIMDHQVALTRHKDHAAEVESKKGELQSLQGHLAKLGSLGRAEDLHLLQGKAEDCFQLFEEASQVVERRQLALSHLAEFLQSHASLSGILRQLRQTVEATNSMNKNESDLIEKDLNDALQNAKALESAAVSLDGILSKAQYHLKIGSSEQRTSCRATADQLCGEVERIQNLLGTKQSEADALAVLKKAFQDQKEELLKSIEDIEERTDKERLKEPTRQALQQRLRVFNQLEDELNSHEHELCWLKDKAKQIAQKDVAFAPEVDREINRLEVTWDDTKRLIHENQGQCCGLIDLMREYQNLKSAVSKVLENASSVIVTRTTIKDQEDLKWAFSKHETAKNKMNYKQKDLDNFTSKGKHLLSELKKIHSSDFSLVKTDMESTVDKWLDVSEKLEENMDRLRVSLSIWDDVLSTRDEIEGWSNNCVPQMAENISNLDNHLRAEELLKEFESEVKNKALRLEELHSKVNDLKELTKNLETPPDLQFIEADLMQKLEHAKEITEVAKGTLKDFTAQSTQVEKFINDITTWFTKVEESLMNCAQNETCEALKKVKDIQKELQSQQSNISSTQENLNSLCRKYHSAELESLGRAMTGLIKKHEAVSQLCSKTQASLQESLEKHFSESMQEFQEWFLGAKAAAKESSDRTGDSKVLEAKLHDLQNILDSVSDGQSKLDAVTQEGQTLYAHLSKQIVSSIQEQITKANEEFQAFLKQCLKDKQALQDCASELGSFEDQHRKLNLWIHEMEERFNTENLGESKQHIPEKKNEVHKVEMFLGELLAARESLDKLSQRGQLLSEEGHGAGQEGRLCSQLLTSHQNLLRMTKEKLRSCQVALQEHEALEEALQSMWFWVKAIQDRLACAESTLGSKDTLEKRLSQIQDILLMKGEGEVKLNMAIGKGEQALRSSNKEGQRVIQTQLETLKEVWADIMSSSVHAQSTLESVISQWNDYVERKNQLEQWMESVDQKIEHPLQPQPGLKEKFVLLDHLQSILSEAEDHTRALHRLIAKSRELYEKTEDESFKDTAQEELKTQFNDIMTVAKEKMRKVEEIVKDHLMYLDAVHEFTDWLHSAKEELHRWSDMSGDSSATQKKLSKIKELIDSREIGASRLSRVESLAPEVKQNTTASGCELMHTEMQALRADWKQWEDSVFQTQSCLENLVSQMALSEQEFSGQVAQLEQALEQFSALLKTWAQQLTLLEGKNTDEEIVECWHKGQEILDALQKAEPRTEDLKSQLNELCRFSRDLSTYSGKVSGLIKEYNCLCLQASKGCQNKEQILQQRFRKAFRDFQQWLVNAKITTAKCFDIPQNISEVSTSLQKIQEFLSESENGQHKLNMMLSKGELLSTLLTKEKAKGIQAKVTAAKEDWKNFHSNLHQKESALENLKIQMKDFEVSAEPIQDWLSKTEKMVHESSNRLYDLPAKRREQQKLQSVLEEIHCYEPQLNRLKEKAQQLWEGQAASKSFRHRVSQLSSQYLALSNLTKEKVSRLDRIVAEHNQFSLGIKELQDWMTDAIHMLDSYCHPTSDKSVLDSRTLKLEALLSVKQEKEIQMKMIVTRGESVLQNTSPEGIPTIQQQLQSVKDMWASLLSAGIRCKSQLEGALSKWTSYQDGVRQFSGWMDSMEANLNESERQHAELRDKTTMLGKAKLLNEEVLSYSSLLETIEVKGAGMTEHYVTQLELQDLQERYRAIQERAKEAVTKSEKLVRLHQEYQRDLKAFEVWLGQEQEKLDQYSVLEGDAHTHETTLRDLQELQVHCAEGQALLNSVLHTREDVIPSGIPQAEDRALESLRQDWQAYQHRLSETRTQFNNVVNKLRLMEQKFQQVDEWLKTAEEKVSPRTRRQSNRATKEIQLHQMKKWHEEVTAYRDEVEEVGARAQEILDESHVNSRMGCQATQLTSRYQALLLQVLEQIKFLEEEIQSLEESESSLSSYSDWYGSTHKNFKNVATKIDKVDTVMMGKKLKTLEVLLKDMEKGHSLLKSAREKGERAVKYLEEGEAERLRKEIHDHMEQLKELTSTVRKEHMTLEKGLHLAKEFSDKCKALTQWIAEYQEILHVPEEPKMELYEKKAQLSKYKSLQQTVLSHEPSVKSVREKGEALLELVQDVTLKDKIDQLQSDYQDLCSIGKEHVFSLEAKVKDHEDYNSELQEVEKWLLQMSGRLVAPDLLETSSLETITQQLAHHKAMMEEIAGFEDRLNNLQMKGDTLIGQCADHLQAKLKQNVHAHLQGTKDSYSAICSTAQRMYQSLEHELQKHVSRQDTLQQCQAWLSAVQPDLEPSPQPPLSRAEAIKQVKHFRALQEQARTYLDLLCSMCDLSNASVKTTAKDIQQTEQTIEQKLVQAQNLTQGWEEIKHLKSELWIYLQDADQQLQNMKRRHSELELNIAQNMVSQVKDFVKKLQSKQASVNTIIEKVNKLTKKEESPEHKEINHLNDQWLDLCRQSNNLCLQREEDLQRTRDYHDCMNVVEVFLEKFTTEWDNLARSDAESTAVHLEALKKLALALQERKYAIEDLKDQKQKMIEHLNLDDKELVKEQTSHLEQRWFQLEDLIKRKIQVSVTNLEELNVVQSRFQELMEWAEEQQPNIAEALKQSPPPDMAQNLLMDHLAICSELEAKQMLLKSLIKDADRVMADLGLNERQVIQKALSDAQSHVNCLSDLVGQRRKYLNKALSEKTQFLMAVFQATSQIQQHERKIMFREHICLLPDDVSKQVKTCKSAQASLKTYQNEVTGLWAQGRELMKEVTEQEKSEVLGKLQELQSVYDSVLQKCSHRLQELEKNLVSRKHFKEDFDKACHWLKQADIVTFPEINLMNESSELHTQLAKYQNILEQSPEYENLLLTLQRTGQTILPSLNEVDHSYLSEKLNALPRQFNVIVALAKDKFYKVQEAILARKEYASLIELTTQSLSELEAQFLRMSKVPTDLAVEEALSLQDGCRAILDEVAGLGEAVDELNQKKEGFRSTGQPWQPDKMLHLVTLYHRLKRQTEQRVSLLEDTTSAYQEHEKMCQQLERQLKSVKEEQSKVNEETLPAEEKLKMYHSLAGSLQDSGIVLKRVTIHLEDLAPHLDPLAYEKARHQIQSWQGELKLLTSAIGETVTECESRMVQSIDFQTEMSRSLDWLRRVKAELSGPVYLDLNLQDIQEEIRKIQIHQEEVQSSLRIMNALSHKEKEKFTKAKELISADLEHSLAELSELDGDIQEALRTRQATLTEIYSQCQRYYQVFQAANDWLEDAQELLQLAGNGLDVESAEENLKSHMEFFSTEDQFHSNLEELHSLVATLDPLIKPTGKEDLEQKVASLELRSQRMSRDSGAQVDLLQRCTAQWHDYQKAREEVIELMNDTEKKLSEFSLLKTSSSHEAEEKLSEHKALVSVVNSFHEKIVALEEKASQLEKTGNDASKATLSRSMTTVWQRWTRLRAVAQDQEKILEDAVDEWTGFNNKVKKATEMIDQLQDKLPGSSAEKASKAELLTLLEYHDTFVLELEQQQSALGMLRQQTLSMLQDGAAPTPGEEPPLMQEITAMQDRCLNMQEKVKTNGKLVKQELKDREMVETQINSVKCWVQETKEYLGNPTIEIDAQLEELQILLTEATNHRQNIEKMAEEQKEKYLGLYTILPSELSLQLAEVALDLKIRDQIQDKIKEVEQSKATSQELSRQIQKLAKDLTTILTKLKAKTDNVVQAKTDQKVLGEELDGCNSKLMELDAAVQKFLEQNGQLGKPLAKKIGKLTELHQQTIRQAENRLSKLNQAASHLEEYNEMLELILKWIEKAKVLAHGTIAWNSASQLREQYILHQTLLEESKEIDSELEAMTEKLQYLTSVYCTEKMSQQVAELGRETEELRQMIKIRLQNLQDAAKDMKKFEAELKKLQAALEQAQATLTSPEVGRLSLKEQLSHRQHLLSEMESLKPKVQAVQLCQSALRIPEDVVASLPLCHAALRLQEEASRLQHTAIQQCNIMQEAVVQYEQYEQEMKHLQQLIEGAHREIEDKPVATSNIQELQAQISRHEELAQKIKGYQEQIASLNSKCKMLTMKAKHATMLLTVTEVEGLAEGTEDLDGELLPTPSAHPSVVMMTAGRCHTLLSPVTEESGEEGTNSEISSPPACRSPSPVANTDASVNQDIAYYQALSAERLQTDAAKIHPSTSASQEFYEPGLEPSATAKLGDLQRSWETLKNVISEKQRTLYEALERQQKYQDSLQSISTKMEAIELKLSESPEPGRSPESQMAEHQALMDEILMLQDEINELQSSLAEELVSESCEADPAEQLALQSTLTVLAERMSTIRMKASGKRQLLEEKLNDQLEEQRQEQALQRYRCEADELDSWLLSTKATLDTALSPPKEPMDMEAQLMDCQNMLVEIEQKVVALSELSVHNENLLLEGKAHTKDEAEQLAGKLRRLKGSLLELQRALHDKQLNMQGTAQEKEESDVDLTATQSPGVQEWLAQARTTWTQQRQSSLQQQKELEQELAEQKSLLRSVASRGEEILIQHSAAETSGDAGEKPDVLSQELGMEGEKSSAEDQMRMKWESLHQEFSTKQKLLQNVLEQEQEQVLYSRPNRLLSGVPLYKGDVPTQDKSAVTSLLDGLNQAFEEVSSQSGGAKRQSIHLEQKLYDGVSATSTWLDDVEERLFVATALLPEETETCLFNQEILAKDIKEMSEEMDKNKNLFSQAFPENGDNRDVIEDTLGCLLGRLSLLDSVVNQRCHQMKERLQQILNFQNDLKVLFTSLADNKYIILQKLANVFEQPVAEQIEAIQQAEDGLKEFDAGIIELKRRGDKLQVEQPSMQELSKLQDMYDELMMIIGSRRSGLNQNLTLKSQYERALQDLADLLETGQEKMAGDQKIIVSSKEEIQQLLDKHKEYFQGLESHMILTETLFRKIISFAVQKETQFHTELMAQASAVLKRAHKRGVELEYILETWSHLDEDQQELSRQLEVVESSIPSVGLVEENEDRLIDRITLYQHLKSSLNEYQPKLYQVLDDGKRLLISISCSDLESQLNQLGECWLSNTNKMSKELHRLETILKHWTRYQSESADLIHWLQSAKDRLEFWTQQSVTVPQELEMVRDHLNAFLEFSKEVDAQSSLKSSVLSTGNQLLRLKKVDTATLRSELSRIDSQWTDLLTNIPAVQEKLHQLQMDKLPSRHAISEVMSWISLMENVIQKDEDNIKNSIGYKAIHEYLQKYKGFKIDINCKQLTVDFVNQSVLQISSQDVESKRSDKTDFAEQLGAMNKSWQILQGLVTEKIQLLEGLLESWSEYENNVQCLKTWFETQEKRLKQQHRIGDQASVQNALKDCQDLEDLIKAKEKEVEKIEQNGLALIQNKKEDVSSIVMSTLRELGQTWANLDHMVGQLKILLKSVLDQWSSHKVAFDKINSYLMEARYSLSRFRLLTGSLEAVQVQVDNLQNLQDDLEKQERSLQKFGSITNQLLKECHPPVTETLTNTLKEVNMRWNNLLEEIAEQLQSSKALLQLWQRYKDYSKQCASTVQQQEDRTNELLKAATNKDIADDEVATWIQDCNDLLKGLGTVKDSLFFLHELGEQLKQQVDASAASAIQSDQLSLSQHLCALEQALCKQQTSLQAGVLDYETFAKSLEALEAWIVEAEEILQGQDPSHSSDLSTIQERMEELKGQMLKFSSMAPDLDRLNELGYRLPLNDKEIKRMQNLNRHWSLISSQTTERFSKLQSFLLQHQTFLEKCETWMEFLVQTEQKLAVEISGNYQHLLEQQRAHELFQAEMFSRQQILHSIIIDGQRLLEQGQVDDRDEFNLKLTLLSNQWQGVIRRAQQRRGIIDSQIRQWQRYREMAEKLRKWLVEVSYLPMSGLGSVPIPLQQARTLFDEVQFKEKVFLRQQGSYILTVEAGKQLLLSADSGAEAALQAELAEIQEKWKSASMRLEEQKKKLAFLLKDWEKCEKGIADSLEKLRTFKKKLSQSLPDHHEELHAEQMRCKELENAVGSWTDDLTQLSLLKDTLSAYISADDISILNERVELLQRQWEELCHQLSLRRQQIGERLNEWAVFSEKNKELCEWLTQMESKVSQNGDILIEEMIEKLKKDYQEEIAIAQENKIQLQQMGERLAKASHESKASEIEYKLGKVNDRWQHLLDLIAARVKKLKETLVAVQQLDKNMSSLRTWLAHIESELAKPIVYDSCNSEEIQRKLNEQQELQRDIEKHSTGVASVLNLCEVLLHDCDACATDAECDSIQQATRNLDRRWRNICAMSMERRLKIEETWRLWQKFLDDYSRFEDWLKSSERTAAFPSSSGVIYTVAKEELKKFEAFQRQVHECLTQLELINKQYRRLARENRTDSACSLKQMVHEGNQRWDNLQKRVTSILRRLKHFIGQREEFETARDSILVWLTEMDLQLTNIEHFSECDVQAKIKQLKAFQQEISLNHNKIEQIIAQGEQLIEKSEPLDAAIIEEELDELRRYCQEVFGRVERYHKKLIRLPLPDDEHDLSDRELELEDSAALSDLHWHDRSADSLLSPQPSSNLSLSLAQPLRSERSGRDTPASVDSIPLEWDHDYDLSRDLESAMSRALPSEDEEGQDDKDFYLRGAVGLSGDHSALESQIRQLGKALDDSRFQIQQTENIIRSKTPTGPELDTSYKGYMKLLGECSSSIDSVKRLEHKLKEEEESLPGFVNLHSTETQTAGVIDRWELLQAQALSKELRMKQNLQKWQQFNSDLNSIWAWLGDTEEELEQLQRLELSTDIQTIELQIKKLKELQKAVDHRKAIILSINLCSPEFTQADSKESRDLQDRLSQMNGRWDRVCSLLEEWRGLLQDALMQCQGFHEMSHGLLLMLENIDRRKNEIVPIDSNLDAEILQDHHKQLMQIKHELLESQLRVASLQDMSCQLLVNAEGTDCLEAKEKVHVIGNRLKLLLKEVSRHIKELEKLLDVSSSQQDLSSWSSADELDTSGSVSPTSGRSTPNRQKTPRGKCSLSQPGPSVSSPHSRSTKGGSDSSLSEPGPGRSGRGFLFRVLRAALPLQLLLLLLIGLACLVPMSEEDYSCALSNNFARSFHPMLRYTNGPPPL

SEQ ID NO: 135 - protein, 2677 aa, homo sapiens
  MISC_FEATURE: SETX
MSTCCWCTPGGASTIDFLKRYASNTPSGEFQTADEDLCYCLECVAEYHKARDELPFLHEVLWELETLRLINHFEKSMKAEIGDDDELYIVDNNGEMPLFDITGQDFENKLRVPLLEILKYPYLLLHERVNELCVEALCRMEQANCSFQVFDKHPGIYLFLVHPNEMVRRWAILTARNLGKVDRDDYYDLQEVLLCLFKVIELGLLESPDIYTSSVLEKGKLILLPSHMYDTTNYKSYWLGICMLLTILEEQAMDSLLLGSDKQNDFMQSILHTMEREADDDSVDPFWPALHCFMVILDRLGSKVWGQLMDPIVAFQTIINNASYNREIRHIRNSSVRTKLEPESYLDDMVTCSQIVYNYNPEKTKKDSGWRTAICPDYCPNMYEEMETLASVLQSDIGQDMRVHNSTFLWFIPFVQSLMDLKDLGVAYIAQVVNHLYSEVKEVLNQTDAVCDKVTEFFLLILVSVIELHRNKKCLHLLWVSSQQWVEAVVKCAKLPTTAFTRSSEKSSGNCSKGTAMISSLSLHSMPSNSVQLAYVQLIRSLLKEGYQLGQQSLCKRFWDKLNLFLRGNLSLGWQLTSQETHELQSCLKQIIRNIKFKAPPCNTFVDLTSACKISPASYNKEESEQMGKTSRKDMHCLEASSPTFSKEPMKVQDSVLIKADNTIEGDNNEQNYIKDVKLEDHLLAGSCLKQSSKNIFTERAEDQIKISTRKQKSVKEISSYTPKDCTSRNGPERGCDRGIIVSTRLLTDSSTDALEKVSTSNEDFSLKDDALAKTSKRKTKVQKDEICAKLSHVIKKQHRKSTLVDNTINLDENLTVSNIESFYSRKDTGVQKGDGFIHNLSLDPSGVLDDKNGEQKSQNNVLPKEKQLKNEELVIFSFHENNCKIQEFHVDGKELIPFTEMTNASEKKSSPFKDLMTVPESRDEEMSNSTSVIYSNLTREQAPDISPKSDTLTDSQIDRDLHKLSLLAQASVITFPSDSPQNSSQLQRKVKEDKRCFTANQNNVGDTSRGQVIIISDSDDDDDERILSLEKLTKQDKICLEREHPEQHVSTVNSKEEKNPVKEEKTETLFQFEESDSQCFEFESSSEVFSVWQDHPDDNNSVQDGEKKCLAPIANTTNGQGCTDYVSEVVKKGAEGIEEHTRPRSISVEEFCEIEVKKPKRKRSEKPMAEDPVRPSSSVRNEGQSDTNKRDLVGNDFKSIDRRTSTPNSRIQRATTVSQKKSSKLCTCTEPIRKVPVSKTPKKTHSDAKKGQNRSSNYLSCRTTPAIVPPKKFRQCPEPTSTAEKLGLKKGPRKAYELSQRSLDYVAQLRDHGKTVGVVDTRKKTKLISPQNLSVRNNKKLLTSQELQMQRQIRPKSQKNRRRLSDCESTDVKRAGSHTAQNSDIFVPESDRSDYNCTGGTEVLANSNRKQLIKCMPSEPETIKAKHGSPATDDACPLNQCDSVVLNGTVPTNEVIVSTSEDPLGGGDPTARHIEMAALKEGEPDSSSDAEEDNLFLTQNDPEDMDLCSQMENDNYKLIELIHGKDTVEVEEDSVSRPQLESLSGTKCKYKDCLETTKNQGEYCPKHSEVKAADEDVFRKPGLPPPASKPLRPTTKIFSSKSTSRIAGLSKSLETSSALSPSLKNKSKGIQSILKVPQPVPLIAQKPVGEMKNSCNVLHPQSPNNSNRQGCKVPFGESKYFPSSSPVNILLSSQSVSDTFVKEVLKWKYEMFLNFGQCGPPASLCQSISRPVPVRFHNYGDYFNVFFPLMVLNTFETVAQEWLNSPNRENFYQLQVRKFPADYIKYWEFAVYLEECELAKQLYPKENDLVFLAPERINEEKKDTERNDIQDLHEYHSGYVHKFRRTSVMRNGKTECYLSIQTQENFPANLNELVNCIVISSLVTTQRKLKAMSLLGSRNQLARAVLNPNPMDFCTKDLLTTTSERIIAYLRDFNEDQKKAIETAYAMVKHSPSVAKICLIHGPPGTGKSKTIVGLLYRLLTENQRKGHSDENSNAKIKQNRVLVCAPSNAAVDELMKKIILEFKEKCKDKKNPLGNCGDINLVRLGPEKSINSEVLKFSLDSQVNHRMKKELPSHVQAMHKRKEFLDYQLDELSRQRALCRGGREIQRQELDENISKVSKERQELASKIKEVQGRPQKTQSIIILESHIICCTLSTSGGLLLESAFRGQGGVPFSCVIVDEAGQSCEIETLTPLIHRCNKLILVGDPKQLPPTVISMKAQEYGYDQSMMARFCRLLEENVEHNMISRLPILQLTVQYRMHPDICLFPSNYVYNRNLKTNRQTEAIRCSSDWPFQPYLVFDVGDGSERRDNDSYINVQEIKLVMEIIKLIKDKRKDVSFRNIGIITHYKAQKTMIQKDLDKEFDRKGPAEVDTVDAFQGRQKDCVIVTCVRANSIQGSIGFLASLQRLNVTITRAKYSLFILGHLRTLMENQHWNQLIQDAQKRGAIIKTCDKNYRHDAVKILKLKPVLQRSLTHPPTIAPEGSRPQGGLPSSKLDSGFAKTSVAASLYHTPSDSKEITLTVTSKDPERPPVHDQLQDPRLLKRMGIEVKGGIFLWDPQPSSPQHPGATPPTGEPGFPVVHQDLSHIQQPAAVVAALSSHKPPVRGEPPAASPEASTCQSKCDDPEEELCHRREARAFSEGEQEKCGSETHHTRRNSRWDKRTLEQEDSSSKKRKLL

SEQ ID NO: 136 - protein, 632 aa, homo sapiens [sequence omitted]

SEQ ID NO: 137 - protein, 635 aa, homo sapiens
  MISC_FEATURE: SLC6A8
MAKKSAENGIYSVSGDEKKGPLIAPGPDGAPAKGDGPVGLGTPGGRLAVPPRETWTRQMDFIMSCVGFAVGLGNVWRFPYLCYKNGGGVFLIPYVLIALVGGIPIFFLEISLGQFMKAGSINVWNICPLFKGLGYASMVIVFYCNTYYIMVLAWGFYYLVKSFTTTLPWATCGHTWNTPDCVEIFRHEDCANASLANLTCDQLADRRSPVIEFWENKVLRLSGGLEVPGALNWEVTLCLLACWVLVYFCVWKGVKSTGKIVYFTATFPYVVLVVLLVRGVLLPGALDGIIYYLKPDWSKLGSPQVWIDAGTQIFFSYAIGLGALTALGSYNRFNNNCYKDAIILALINSGTSFFAGFVVFSILGFMAAEQGVHISKVAESGPGLAFIAYPRAVTLMPVAPLWAALFFFMLLLLGLDSQFVGVEGFITGLLDLLPASYYFRFQREISVALCCALCFVIDLSMVTDGGMYVFQLFDYYSASGTTLLWQAFWECVVVAWVYGADRFMDDIACMIGYRPCPWMKWCWSFFTPLVCMGIFIFNVVYYEPLVYNNTYVYPWWGEAMGWAFALSSMLCVPLHLLGCLLRAKGTMAERWQHLTQPIWGLHHLEYRAQDADVRGLTTLTPVSESSKVVVVESVM

SEQ ID NO: 138 - protein, 875 aa, homo sapiens
  MISC_FEATURE: UBE3A
MEKLHQCYWKSGEPQSDDIEASRMKRAAAKHLIERYYHQLTEGCGNEACTNEFCASCPTFLRMDNNAAAIKALELYKINAKLCDPHPSKKGASSAYLENSKGAPNNSCSEIKMNKKGARIDFKDVTYLTEEKVYEILELCREREDYSPLIRVIGRVFSSAEALVQSFRKVKQHTKEELKSLQAKDEDKDEDEKEKAACSAAAMEEDSEASSSRIGDSSQGDNNLQKLGPDDVSVDIDAIRRVYTRLLSNEKIETAFLNALVYLSPNVECDLTYHNVYSRDPNYLNLFIIVMENRNLHSPEYLEMALPLFCKAMSKLPLAAQGKLIRLWSKYNADQIRRMMETFQQLITYKVISNEFNSRNLVNDDDAIVAASKCLKMVYYANVVGGEVDTNHNEEDDEEPIPESSELTLQELLGEERRNKKGPRVDPLETELGVKTLDCRKPLIPFEEFINEPLNEVLEMDKDYTFFKVETENKFSFMTCPFILNAVTKNLGLYYDNRIRMYSERRITVLYSLVQGQQLNPYLRLKVRRDHIIDDALVRLEMIAMENPADLKKQLYVEFEGEQGVDEGGVSKEFFQLVVEEIFNPDIGMFTYDESTKLFWFNPSSFETEGQFTLIGIVLGLAIYNNCILDVHFPMVVYRKLMGKKGTFRDLGDSHPVLYQSLKDLLEYEGNVEDDMMITFQISQTDLFGNPMMYDLKENGDKIPITNENRKEFVNLYSDYILNKSVEKQFKAFRRGFHMVTNESPLKYLFRPEEIELLICGSRNLDFQALEETTEYDGGYTRDSVLIREFWEIVHSFTDEQKRLFLQFTTGTDRAPVGGLGKLKMIIAKNGPDTERLPTSHTCFNVLLLPEYSSKEKLKERLLKAITYAKGFGML

SEQ ID NO: 139 - protein, 154 aa, homo sapiens [sequence omitted]

SEQ ID NO: 140 - protein, 414 aa, homo sapiens
  MISC_FEATURE: TDP43
MSEYIRVTEDENDEPIEIPSEDDGTVLLSTVTAQFPGACGLRYRNPVSQCMRGVRLVEGILHAPDAGWGNLVYVVNYPKDNKRKMDETDASSAVKVKRAVQKTSDLIVLGLPWKTTEQDLKEYFSTFGEVLMVQVKKDLKTGHSKGFGFVRFTEYETQVKVMSQRHMIDGRWCDCKLPNSKQSQDEPLRSRKVFVGRCTEDMTEDELREFFSQYGDVMDVFIPKPFRAFAFVTFADDQIAQSLCGEDLIIKGISVHISNAEPKHNSNRQLERSGRFGGNPGGFGNQGGFGNSRGGGAGLGNNQGSNMGGGMNFGAFSINPAMMAAAQAALQSSWGMMGMLASQQNQSGPSGNNQNQGNMQREPNQAFGSGNNSYSGSNSGAAIGWGSASNAGSGSGFNGGFGSSMDSKSSGWGM

SEQ ID NO: 141 - protein, 481 aa, homo sapiens
  MISC_FEATURE: C9orf72
MSTLCPPPSPAVAKTEIALSGKSPLLAATFAYWDNILGPRVRHIWAPKTEQVLLSDGEITFLANHTLNGEILRNAESGAIDVKFFVLSEKGVIIVSLIFDGNWNGDRSTYGLSIILPQTELSFYLPLHRVCVDRLTHIIRKGRIWMHKERQENVQKIILEGTERMEDQGQSIIPMLTGEVIPVMELLSSMKSHSVPEEIDIADTVLNDDDIGDSCHEGFLLNAISSHLQTCGCSVVVGSSAEKVNKIVRTLCLFLTPAERKCSRLCEAESSFKYESGLFVQGLLKDSTGSFVLPFRQVMYAPYPTTHIDVDVNTVKQMPPCHEHIYNQRRYMRSELTAFWRATSEEDMAQDTIIYTDESFTPDLNIFQDVLHRDTLVKAFLDQVFQLKPGLSLRSTFLAQFLLVLHRKALTLIKYIEDDTQKGKKPFKSLRNLKIDLDLTAEGDLNIIMALAEKIKPGLHSFIFGRPFYTSVQERDVLMTF

SEQ ID NO: 142 - protein, 210 aa, homo sapiens
  MISC_FEATURE: FXN
MWTLGRRAVAGLLASPSPAQAQTLTRVPRPAELAPLCGRRGLRTDIDATCTPRRASSNQRGLNQIWNVKKQSVYLMNLRKSGTLGHPGSLDETTYERLAEETLDSLAEFFEDLADKPYTFEDYDVSFGSGVLTVKLGGDLGTYVINKQTPNKQIWLSSPSSGPKRYDWTGKNWVYSHDGVSLHELLAAELTKALKTKLDLSSLAYSGKDA

SEQ ID NO: 143 - protein, 486 aa, homo sapiens
  MISC_FEATURE: MECP2
MVAGMLGLREEKSEDQDLQGLKDKPLKFKKVKKDKKEEKEGKHEPVQPSAHHSAEPAEAGKAETSEGSGSAPAVPEASASPKQRRSIIRDRGPMYDDPTLPEGWTRKLKQRKSGRSAGKYDVYLINPQGKAFRSKVELIAYFEKVGDTSLDPNDFDFTVTGRGSPSRREQKPPKKPKSPKAPGTGRGRGRPKGSGTTRPKAATSEGVQVKRVLEKSPGKLLVKMPFQTSPGGKAEGGGATTSTQVMVIKRPGRKRKAEADPQAIPKKRGRKPGSVVAAAAAEAKKKAVKESSIRSVQETVLPIKKRKTRETVSIEVKEVVKPLLVSTLGEKSGKGLKTCKSPGRKSKESSPKGRSSSASSPPKKEHHHHHHHSESPKAPVPLLPPLPPPPPEPESSEDPTSPPEPQDLSSSVCKEEKMPRGGSLESDGCPKEPAKTQPAVATAATAAEKYKHRGEGERKDIVSSSMPRPNREEPVDSRTPVTERVS

SEQ ID NO: 144 - protein, 313 aa, homo sapiens
  MISC_FEATURE: ASPA
MTSCHIAEEHIQKVAIFGGTHGNELTGVFLVKHWLENGAEIQRTGLEVKPFITNPRAVKKCTRYIDCDLNRIFDLENLGKKMSEDLPYEVRRAQEINHLFGPKDSEDSYDIIFDLHNTTSNMGCTLILEDSRNNFLIQMFHYIKTSLAPLPCYVYLIEHPSLKYATTRSIAKYPVGIEVGPQPQGVLRADILDQMRKMIKHALDFIHHFNEGKEFPPCAIEVYKIIEKVDYPRDENGEIAAIIHPNLQDQDWKPLHPGDPMFLTLDGKTIPLGGDCTVYPVFVNEAAYYEKKEAFAKTTKLTLNAKSIRCCLH

SEQ ID NO: 145 - protein, 539 aa, homo sapiens
  MISC_FEATURE: ALDH7A1
MWRLPRALCVHAAKTSKLSGPWSRPAAFMSTLLINQPQYAWLKELGLREENEGVYNGSWGGRGEVITTYCPANNEPIARVRQASVADYEETVKKAREAWKIWADIPAPKRGEIVRQIGDALREKIQVLGSLVSLEMGKILVEGVGEVQEYVDICDYAVGLSRMIGGPILPSERSGHALIEQWNPVGLVGIITAFNFPVAVYGWNNAIAMICGNVCLWKGAPTTSLISVAVTKIIAKVLEDNKLPGAICSLTCGGADIGTAMAKDERVNLLSFTGSTQVGKQVGLMVQERFGRSLLELGGNNAIIAFEDADLSLVVPSALFAAVGTAGQRCTTARRLFIHESIHDEVVNRLKKAYAQIRVGNPWDPNVLYGPLHTKQAVSMFLGAVEEAKKEGGTVVYGGKVMDRPGNYVEPTIVTGLGHDASIAHTETFAPILYVFKFKNEEEVFAWNNEVKQGLSSSIFTKDLGRIFRWLGPKGSDCGIVNVNIPTSGAEIGGAFGGEKHTGGGRESGSDAWKQYMRRSTCTINYSKDLPLAQGIKFQ

SEQ ID NO: 146 - protein, 563 aa, homo sapiens
  MISC_FEATURE: TPP1
MGLQACLLGLFALILSGKCSYSPEPDQRRTLPPGWVSLGRADPEEELSLTFALRQQNVERLSELVQAVSDPSSPQYGKYLTLENVADLVRPSPLTLHTVQKWLLAAGAQKCHSVITQDFLTCWLSIRQAELLLPGAEFHHYVGGPTETHVVRSPHPYQLPQALAPHVDFVGGLHRFPPTSSLRQRPEPQVTGTVGLHLGVTPSVIRKRYNLTSQDVGSGTSNNSQACAQFLEQYFHDSDLAQFMRLFGGNFAHQASVARVVGQQGRGRAGIEASLDVQYLMSAGANISTWVYSSPGRHEGQEPFLQWLMLLSNESALPHVHTVSYGDDEDSLSSAYIQRVNTELMKAAARGLTLLFASGDSGAGCWSVSGRHQFRPTFPASSPYVTTVGGTSFQEPFLITNEIVDYISGGGFSNVFPRPSYQEEAVTKFLSSSPHLPPSSYFNASGRAYPDVAALSDGYWVVSNRVPIPWVSGTSASTPVFGGILSLINEHRILSGRPPLGFLNPRLYQQHGAGLFDVTRGCHESCLDEEVEGQGFCSGPGWDPVTGWGTPNFPALLKTLLNP

SEQ ID NO: 147 - protein, 466 aa, homo sapiens
  MISC_FEATURE: FUCA1
MRAPGMRSRPAGPALLLLLLFLGAAESVRRAQPPRRYTPDWPSLDSRPLPAWFDEAKFGVFIHWGVFSVPAWGSEWFWWHWQGEGRPQYQRFMRDNYPPGFSYADFGPQFTARFFHPEEWADLFQAAGAKYVVLTTKHHEGFTNWPSPVSWNWNSKDVGPHRDLVGELGTALRKRNIRYGLYHSLLEWFHPLYLLDKKNGFKTQHFVSAKTMPELYDLVNSYKPDLIWSDGEWECPDTYWNSTNFLSWLYNDSPVKDEVVVNDRWGQNCSCHHGGYYNCEDKFKPQSLPDHKWEMCTSIDKFSWGYRRDMALSDVTEESEIISELVQTVSLGGNYLLNIGPTKDGLIVPIFQERLLAVGKWLSINGEAIYASKPWRVQWEKNTTSVWYTSKGSAVYAIFLHWPENGVLNLESPITTSTTKITMLGIQGDLKWSTDPDKGLFISLPQLPPSAVPAEFAWTIKLTGVK

SEQ ID NO: 148 - protein, 685 aa, homo sapiens
  MISC_FEATURE: GALC
MAEWLLSASWQRRAKAMTAAAGSAGRAAVPLLLCALLAPGGAYVLDDSDGLGREFDGIGAVSGGGATSRLLVNYPEPYRSQILDYLFKPNFGASLHILKVEIGGDGQTTDGTEPSHMHYALDENYFRGYEWWLMKEAKKRNPNITLIGLPWSFPGWLGKGFDWPYVNLQLTAYYVVTWIVGAKRYHDLDIDYIGIWNERSYNANYIKILRKMLNYQGLQRVKIIASDNLWESISASMLLDAELFKVVDVIGAHYPGTHSAKDAKLTGKKLWSSEDFSTLNSDMGAGCWGRILNQNYINGYMTSTIAWNLVASYYEQLPYGRCGLMTAQEPWSGHYVVESPVWVSAHTTQFTQPGWYYLKTVGHLEKGGSYVALTDGLGNLTIIIETMSHKHSKCIRPFLPYFNVSQQFATFVLKGSFSEIPELQVWYTKLGKTSERFLFKQLDSLWLLDSDGSFTLSLHEDELFTLTTLTTGRKGSYPLPPKSQPFPSTYKDDFNVDYPFFSEAPNFADQTGVFEYFTNIEDPGEHHFTLRQVLNQRPITWAADASNTISIIGDYNWTNLTIKCDVYIETPDTGGVFIAGRVNKGGILIRSARGIFFWIFANGSYRVTGDLAGWIIYALGRVEVTAKKWYTLTLTIKGHFTSGMLNDKSLWTDIPVNFPKNGWAAIGTHSFEFAQFDNFLVEATR

SEQ ID NO: 149 - protein, 529 aa, homo sapiens
  MISC_FEATURE: HEXA
MTSSRLWFSLLLAAAFAGRATALWPWPQNFQTSDQRYVLYPNNFQFQYDVSSAAQPGCSVLDEAFQRYRDLLFGSGSWPRPYLTGKRHTLEKNVLVVSVVTPGCNQLPTLESVENYTLTINDDQCLLLSETVWGALRGLETFSQLVWKSAEGTFFINKTEIEDFPRFPHRGLLLDTSRHYLPLSSILDTLDVMAYNKLNVFHWHLVDDPSFPYESFTFPELMRKGSYNPVTHIYTAQDVKEVIEYARLRGIRVLAEFDTPGHTLSWGPGIPGLLTPCYSGSEPSGTFGPVNPSLNNTYEFMSTFFLEVSSVFPDFYLHLGGDEVDFTCWKSNPEIQDFMRKKGFGEDFKQLESFYIQTLLDIVSSYGKGYVVWQEVFDNKVKIQPDTIIQVWREDIPVNYMKELELVTKAGFRALLSAPWYLNRISYGPDWKDFYIVEPLAFEGTPEQKALVIGGEACMWGEYVDNTNLVPRLWPRAGAVAERLWSNKLTSDLTFAYERLSHFRCELLRRGVQAQPLNVGFCEQEFEQT

SEQ ID NO: 150 - protein, 556 aa, homo sapiens
  MISC_FEATURE: HEXB
MELCGLGLPRPPMLLALLLATLLAAMLALLTQVALVVQVAEAARAPSVSAKPGPALWPLPLSVKMTPNLLHLAPENFYISHSPNSTAGPSCTLLEEAFRRYHGYIFGFYKWHHEPAEFQAKTQVQQLLVSITLQSECDAFPNISSDESYTLLVKEPVAVLKANRVWGALRGLETFSQLVYQDSYGTFTINESTIIDSPRFSHRGILIDTSRHYLPVKIILKTLDAMAFNKFNVLHWHIVDDQSFPYQSITFPELSNKGSYSLSHVYTPNDVRMVIEYARLRGIRVLPEFDTPGHTLSWGKGQKDLLTPCYSRQNKLDSFGPINPTLNTTYSFLTTFFKEISEVFPDQFIHLGGDEVEFKCWESNPKIQDFMRQKGFGTDFKKLESFYIQKVLDIIATINKGSIVWQEVFDDKAKLAPGTIVEVWKDSAYPEELSRVTASGFPVILSAPWYLDLISYGQDWRKYYKVEPLDFGGTQKQKQLFIGGEACLWGEYVDATNLTPRLWPRASAVGERLWSSKDVRDMDDAYDRLTRHRCRMVERGIAAQPLYAGYCNHENM

SEQ ID NO: 151 - protein, 879 aa, homo sapiens
  MISC_FEATURE: MANBA
MRLHLLLLLALCGAGTTAAELSYSLRGNWSICNGNGSLELPGAVPGCVHSALFQQGLIQDSYYRFNDLNYRWVSLDNWTYSKEFKIPFEISKWQKVNLILEGVDTVSKILFNEVTIGETDNMFNRYSFDITNVVRDVNSIELRFQSAVLYAAQQSKAHTRYQVPPDCPPLVQKGECHVNFVRKEQCSFSWDWGPSFPTQGIWKDVRIEAYNICHLNYFTFSPIYDKSAQEWNLEIESTFDVVSSKPVGGQVIVAIPKLQTQQTYSIELQPGKRIVELFVNISKNITVETWWPHGHGNQTGYNMTVLFELDGGLNIEKSAKVYFRTVELIEEPIKGSPGLSFYFKINGFPIFLKGSNWIPADSFQDRVTSELLRLLLQSVVDANMNTLRVWGGGIYEQDEFYELCDELGIMVWQDFMFACALYPTDQGFLDSVTAEVAYQIKRLKSHPSIIIWSGNNENEEALMMNWYHISFTDRPIYIKDYVTLYVKNIRELVLAGDKSRPFITSSPTNGAETVAEAWVSQNPNSNYFGDVHFYDYISDCWNWKVFPKARFASEYGYQSWPSFSTLEKVSSTEDWSFNSKFSLHRQHHEGGNKQMLYQAGLHFKLPQSTDPLRTFKDTIYLTQVMQAQCVKTETEFYRRSRSEIVDQQGHTMGALYWQLNDIWQAPSWASLEYGGKWKMLHYFAQNFFAPLLPVGFENENTFYIYGVSDLHSDYSMTLSVRVHTWSSLEPVCSRVTERFVMKGGEAVCLYEEPVSELLRRCGNCTRESCVVSFYLSADHELLSPTNYHFLSSPKEAVGLCKAQITAIISQQGDIFVFDLETSAVAPFVWLDVGSIPGRFSDNGFLMTEKTRTILFYPWEPTSKNELEQSFHVTSLTDIY

SEQ ID NO: 152 - protein, 507 aa, homo sapiens
  MISC_FEATURE: ARSA
MGAPRSLLLALAAGLAVARPPNIVLIFADDLGYGDLGCYGHPSSTTPNLDQLAAGGLRFTDFYVPVSLCTPSRAALLTGRLPVRMGMYPGVLVPSSRGGLPLEEVTVAEVLAARGYLTGMAGKWHLGVGPEGAFLPPHQGFHRFLGIPYSHDQGPCQNLTCFPPATPCDGGCDQGLVPIPLLANLSVEAQPPWLPGLEARYMAFAHDLMADAQRQDRPFFLYYASHHTHYPQFSGQSFAERSGRGPFGDSLMELDAAVGTLMTAIGDLGLLEETLVIFTADNGPETMRMSRGGCSGLLRCGKGTTYEGGVREPALAFWPGHIAPGVTHELASSLDLLPTLAALAGAPLPNVTLDGFDLSPLLLGTGKSPRQSLFFYPSYPDEVRGVFAVRTGKYKAHFFTQGSAHSDTTADPACHASSSLTAHEPPLLYDLSKDPGENYNLLGGVAGATPEVLQALKQLQLLKAQLDAAVTFGPSQVARGEDPALQICCHPGCTPRPACCHCPDPHA

SEQ ID NO: 153 - protein, 1256 aa, homo sapiens
  MISC_FEATURE: GNPTAB
MLFKLLQRQTYTCLSHRYGLYVCFLGVVVTIVSAFQFGEVVLEWSRDQYHVLFDSYRDNIAGKSFQNRLCLPMPIDVVYTWVNGTDLELLKELQQVREQMEEEQKAMREILGKNTTEPTKKSEKQLECLLTHCIKVPMLVLDPALPANITLKDLPSLYPSFHSASDIFNVAKPKNPSTNVSVVVFDSTKDVEDAHSGLLKGNSRQTVWRGYLTTDKEVPGLVLMQDLAFLSGFPPTFKETNQLKTKLPENLSSKVKLLQLYSEASVALLKLNNPKDFQELNKQTKKNMTIDGKELTISPAYLLWDLSAISQSKQDEDISASRFEDNEELRYSLRSIERHAPWVRNIFIVTNGQIPSWLNLDNPRVTIVTHQDVFRNLSHLPTFSSPAIESHIHRIEGLSQKFIYLNDDVMFGKDVWPDDFYSHSKGQKVYLTWPVPNCAEGCPGSWIKDGYCDKACNNSACDWDGGDCSGNSGGSRYIAGGGGTGSIGVGQPWQFGGGINSVSYCNQGCANSWLADKFCDQACNVLSCGFDAGDCGQDHFHELYKVILLPNQTHYIIPKGECLPYFSFAEVAKRGVEGAYSDNPIIRHASIANKWKTIHLIMHSGMNATTIHFNLTFQNTNDEEFKMQITVEVDTREGPKLNSTAQKGYENLVSPITLLPEAEILFEDIPKEKRFPKFKRHDVNSTRRAQEEVKIPLVNISLLPKDAQLSLNTLDLQLEHGDITLKGYNLSKSALLRSFLMNSQHAKIKNQAIITDETNDSLVAPQEKQVHKSILPNSLGVSERLQRLTFPAVSVKVNGHDQGQNPPLDLETTARFRVETHTQKTIGGNVTKEKPPSLIVPLESQMTKEKKITGKEKENSRMEENAENHIGVTEVLLGRKLQHYTDSYLGFLPWEKKKYFQDLLDEEESLKTQLAYFTDSKNTGRQLKDTFADSLRYVNKILNSKFGFTSRKVPAHMPHMIDRIVMQELQDMFPEEFDKTSFHKVRHSEDMQFAFSYFYYLMSAVQPLNISQVFDEVDTDQSGVLSDREIRTLATRIHELPLSLQDLTGLEHMLINCSKMLPADITQLNNIPPTQESYYDPNLPPVTKSLVTNCKPVTDKIHKAYKDKNKYRFEIMGEEEIAFKMIRTNVSHVVGQLDDIRKNPRKFVCLNDNIDHNHKDAQTVKAVLRDFYESMFPIPSQFELPREYRNRFLHMHELQEWRAYRDKLKFWTHCVLATLIMFTIFSFFAEQLIALKRKIFPRRRIHKEASPNRIRV

SEQ ID NO: 154 - protein, 580 aa, homo sapiens
  MISC_FEATURE: MCOLN1
MTAPAGPRGSETERLLTPNPGYGTQAGPSPAPPTPPEEEDLRRRLKYFFMSPCDKFRAKGRKPCKLMLQVVKILVVTVQLILFGLSNQLAVTFREENTIAFRHLFLLGYSDGADDTFAAYTREQLYQAIFHAVDQYLALPDVSLGRYAYVRGGGDPWTNGSGLALCQRYYHRGHVDPANDTFDIDPMVVTDCIQVDPPERPPPPPSDDLTLLESSSSYKNLTLKFHKLVNVTIHFRLKTINLQSLINNEIPDCYTFSVLITFDNKAHSGRIPISLETQAHIQECKHPSVFQHGDNSFRLLFDVVVILTCSLSFLLCARSLLRGFLLQNEFVGFMWRQRGRVISLWERLEFVNGWYILLVTSDVLTISGTIMKIGIEAKNLASYDVCSILLGTSTLLVWVGVIRYLTFFHNYNILIATLRVALPSVMRFCCCVAVIYLGYCFCGWIVLGPYHVKFRSLSMVSECLFSLINGDDMFVTFAAMQAQQGRSSLVWLFSQLYLYSFISLFIYMVLSLFIALITGAYDTIKHPGGAGAEESELQAYIAQCQDSPTSGKFRRGSGSACSLLCCCGRDPSEEHSLLVN

SEQ ID NO: 155 - protein, 5 aa, artificial sequence
  Caspase 2 protein sequence
VDVAD

SEQ ID NO: 156 - RNA, 22 nt, artificial sequence
  miR-338-3p
uccagcaucagugauuuuguug

SEQ ID NO: 157 - RNA, 23 nt, artificial sequence
  miR-9-5p
ucuuugguuaucuagcuguauga

SEQ ID NO: 158 - RNA, 22 nt, artificial sequence
  miR-9-3p
auaaagcuagauaaccgaaagu

SEQ ID NO: 159 - RNA, 22 nt, artificial sequence
  miR-125b-5p
ucccugagacccuaacuuguga

SEQ ID NO: 160 - RNA, 23 nt, artificial sequence
  miR-342-3p
ucucacacagaaaucgcacccgu

SEQ ID NO: 161 - RNA, 22 nt, artificial sequence
  miR-124-3p
uaaggcacgcggugaaugccaa

SEQ ID NO: 162 - RNA, 22 nt, artificial sequence
  miR-124-5p
cguguucacagcggaccuugau

What is claimed is:

1. A fusosome comprising:
a) a lipid bilayer comprising a fusogen; and
b) a nucleic acid that comprises:
(i) a payload gene encoding an exogenous agent; and
(ii) a positive target cell-specific regulatory element operatively linked to the payload gene, wherein the positive target cell-specific regulatory element increases expression of the payload gene in a target cell relative to an otherwise similar fusosome lacking the positive target cell-specific regulatory element, wherein the target cell is a CNS cell.

2. The fusosome of claim 1, wherein the nucleic acid further comprises a non-target cell-specific regulatory element (NTCSRE), operatively linked to the payload gene, wherein the NTCSRE decreases expression of the payload gene in a non-target cell relative to an otherwise similar fusosome lacking the NTCSRE, wherein the target cell is a first type of CNS cell and the non-target cell is a second, different type of CNS cell or a non-CNS cell optionally wherein:
the target cell is a neuron and the non-target cell is a glial cell, optionally wherein the glial cell is an oligodendrocyte, an astrocyte, or a microglia cell, or
the target cell is a glial cell, optionally wherein the glial cell is an oligodendrocyte, an astrocyte, or a microglia cell, and the non-target cell is a neuron.

3. A fusosome comprising:
a) a lipid bilayer comprising a fusogen; and
b) a nucleic acid that comprises:
(i) a payload gene encoding an exogenous agent; and
(ii) a promoter operatively linked to the payload gene, wherein the promoter is chosen from a SYN, NSE, CaMKII, aTubulin, PDGF, fSST, fNPY, GAD67, DLX5/6, VGLUT1, Dock10, ChAT, VAChT, Drd1a, TPH-2, GFAP, EAAT1, GS, CX3CR1, TMEM119, MBP, CNP, or CRFR2β promoter.

4. A fusosome comprising:
a) a lipid bilayer comprising a fusogen; and
b) a nucleic acid that comprises:
(i) a payload gene encoding an exogenous agent; and
(ii) a non-target cell-specific regulatory element (NTCSRE) operatively linked to the payload gene, wherein:
the NTCSRE decreases expression of the payload gene in a non-target cell or tissue relative to an otherwise similar fusosome lacking the NTCSRE, wherein the target cell is a first type of CNS cell and the non-target cell is a second, different type of CNS cell or a non-CNS cell; and
the NTCSRE comprises a non-target cell-specific miRNA recognition sequence, non-target cell-specific protease recognition site, non-target cell-specific ubiquitin ligase site, non-target cell-specific transcriptional repression site, or non-target cell-specific epigenetic repression site.

5. The fusosome of claim 4, wherein the nucleic acid further comprises a positive target cell-specific regulatory element operatively linked to the payload gene, wherein the positive target cell-specific regulatory element increases expression of the payload gene in a target cell relative to an otherwise similar fusosome lacking the positive target cell-specific regulatory element, wherein the target cell is a CNS cell.

6. The fusosome of any of claims 1-5, wherein the fusosome further comprises one or both of:
(i) a first exogenous or overexpressed immunosuppressive protein on the lipid bilayer; or
(ii) a first immunostimulatory protein that is absent or present at reduced levels, optionally wherein the reduced level is reduced by at least 10%, 20%, 30%, 40%, 50%, 60%, 70%, 80%, or 90% compared to a fusosome generated from an otherwise similar, unmodified source cell.

7. The fusosome of any of claims 1-6, wherein the payload gene is a gene that treats a lysosomal storage disease or disorder or a CNS disease or disorder, optionally wherein the disease or disorder is a genetic deficiency.

8. A fusosome comprising:
a) a lipid bilayer comprising a fusogen;
b) a nucleic acid that comprises a payload gene encoding an exogenous agent for treating a lysososomal storage disease or disorder or a CNS disease or disorder; and
c) one or both of:
(i) a first exogenous or overexpressed immunosuppressive protein on the lipid bilayer; or
(ii) a first immunostimulatory protein that is absent or present at reduced levels (e.g., reduced by at least 10%, 20%, 30%, 40%, 50%, 60%, 70%, 80%, or 90%) compared to a fusosome generated from an otherwise similar, unmodified source cell.

9. The fusosome of any of claims 6-8, which comprises (i) and (ii).

10. The fusosome of any of claims 6-8, which comprises (i) and further comprises a second exogenous or overexpressed immunosuppressive protein on the lipid bilayer.

11. The fusosome of any of claims 6-10, which comprises (ii) and further comprises a second immunostimulatory protein that is absent or present at reduced levels, optionally wherein the reduced level is reduced by at least 10%, 20%, 30%, 40%, 50%, 60%, 70%, 80%, or 90% compared to a fusosome generated from an otherwise similar, unmodified source cell.

12. The fusosome of any of claims 8-11, wherein the nucleic acid further comprises a positive target cell-specific regulatory element operatively linked to the payload gene, wherein the positive target cell-specific regulatory element increases expression of the payload gene in a target cell relative to an otherwise similar fusosome lacking the positive target cell-specific regulatory element, wherein the target cell is a CNS cell.

13. The fusosome of any of claims 8-12, wherein the nucleic acid further comprises a non-target cell-specific regulatory element (NTCSRE) operatively linked to the payload gene, wherein the NTCSRE decreases expression of the payload gene in a non-target cell or tissue relative to an otherwise similar fusosome lacking the NTCSRE, wherein the target cell is a first type of CNS cell and the non-target cell is a second, different type of CNS cell or a non-CNS cell, optionally wherein:
the target cell is a neuron and the non-target cell is a glial cell, optionally wherein the glial cell is an oligodendrocyte, an astrocyte, or a microglia cell, or
the target cell is a glial cell, optionally wherein the glial cell is an oligodendrocyte, an astrocyte, or a microglia cell, and the non-target cell is a neuron.

14. The fusosome of any of claims 6-13, wherein, when administered to a subject, one or more of:
i) the fusosome does not produce a detectable antibody response or antibodies against the fusosome are present at a level of less than 10%, 5%, 4%, 3%, 2%, or 1% above a background level;
ii) the fusosome does not produce a detectable cellular immune response, or a cellular immune response against the fusosome is present at a level of less than 10%, 5%, 4%, 3%, 2%, or 1% above a background level;
iii) the fusosome does not produce a detectable innate immune response), or the innate immune response against the fusosome is present at a level of less than 10%, 5%, 4%, 3%, 2%, or 1% above a background level,;
iv) less than 10%, 5%, 4%, 3%, 2%, or 1% of fusosomes are inactivated by serum;
v) a target cell that has received the exogenous agent from the fusosome does not produce a detectable antibody response, or antibodies against the target cell are present at a level of less than 10%, 5%, 4%, 3%, 2%, or 1% above a background level; or
vi) a target cell that has received the exogenous agent from the fusosome does not produce a detectable cellular immune response, or a cellular response against the target cell is present at a level of less than 10%, 5%, 4%, 3%, 2%, or 1% above a background level.

15. The fusosome of claim 14, wherein the background level is the corresponding level in the same subject prior to administration of the fusosome.

16. The fusosome of any of claims 6-15, wherein the immunosuppressive protein is a complement regulatory protein or CD47.

17. The fusosome of any of claims 6-16, wherein the immunostimulatory protein is an MHC I or MHC II protein.

18. The fusosome of any of claims 1-17, wherein one or more of:
i) the fusosome fuses at a higher rate with the CNS target cell than with a non-target cell, optionally wherein the higher rate is by at least at least 1%, 2%, 3%, 4%, 5%, 10%, 20%, 30%, 40%, 50%, 60%, 70%, 80%, 90%, 2-fold, 3-fold, 4-fold, 5-fold, 10-fold, 20-fold, 50-fold, or 100-fold;
ii) the fusosome fuses at a higher rate with the CNS target cell than with another fusosome, optionally wherein the higher rate is by at least 10%, 20%, 30%, 40%, 50%, 60%, 70%, 80%, or 90%, 2-fold, 3-fold, 4-fold, 5-fold, 10-fold, 20-fold, 50-fold, or 100-fold;
iii) the fusosome fuses with CNS target cells at a rate such that the exogenous agent in the fusosome is delivered to at least 10%, 20%, 30%, 40%, 50%, 60%, 70%, 80%, or 90%, of CNS target cells after 24, 48, or 72 hours;
iv) the fusosome delivers the nucleic acid to the CNS target cell at a higher rate than to a non-target cell, optionally wherein the higher rate is by at least at least 1%, 2%, 3%, 4%, 5%, 10%, 20%, 30%, 40%, 50%, 60%, 70%, 80%, 90%, 2-fold, 3-fold, 4-fold, 5-fold, 10-fold, 20-fold, 50-fold, or 100-fold;
v) the fusosome delivers the nucleic acid to the CNS target cell at a higher rate than to another fusosome, optionally wherein the higher rate is by at least 10%, 20%, 30%, 40%, 50%, 60%, 70%, 80%, or 90%, 2-fold, 3-fold, 4-fold, 5-fold, 10-fold, 20-fold, 50-fold, or 100-fold; or
vi) the fusosome delivers the nucleic acid to athe CNS target cell at a rate such that the exogenous agent in the fusosome is delivered to at least 10%, 20%, 30%, 40%, 50%, 60%, 70%, 80%, or 90%, of target cells after 24, 48, or 72 hours.

19. The fusosome of any of claims 1-18, wherein the exogenous agent is chosen from: SYNE1, SETX, FMR1, SLC6A8, UBE3A, SOD1, TDP43, C9orf72, FXN, MECP2, ASPA, or ALDH7A1; or the exogenous agent is chosen from: TPP1, FUCA1, GALC, HEXA, HEXB, MANBA, ARSA, GNPTAB, or MCOLN1.

20. The fusosome of any of claims 1-19, wherein the payload gene is selected from among SYNE1, SETX, FMR1, SLC6A8, UBE3A, SOD1, TDP43, C9orf72, FXN, MECP2, ASPA and ALDH7A1.

21. The fusosome of any of claims 1-20, wherein the payload gene encodes an exogenous agent comprising the sequence set forth in any one of SEQ ID NOS: 134-145, a functional fragment thereof, or a functional variant thereof comprising an amino acid sequence having at least 70%, 75%, 80%, 85%, 90%, 95%, 96%, 97%, 98%, or 99%, identity to an amino acid sequence set forth in any one of SEQ ID NOS: 134-145.

22. The fusosome of any of claims 1-19, wherein the payload gene is selected from TPP1, FUCA1, GALC, HEXA, HEXB, MANBA, ARSA, GNPTAB and MCOLN1.

23. The fusosome of any of claims 1-19 and 22, wherein the payload gene encodes an exogenous agent comprising the sequence set forth in any one of SEQ ID NOS: 146-154, a functional fragment thereof, or a functional variant thereof comprising an amino acid sequence having at least 70%, 75%, 80%, 85%, 90%, 95%, 96%, 97%, 98%, or 99%, identity to an amino acid sequence set forth in any one of SEQ ID NOS: 146-154.

24. The fusosome of any of claims 1-23, wherein the fusogen targets a CNS cell, optionally wherein the CNS cell is a neuron or a glial cell, optionally wherein the CNS cell is a pan-neuronal cell, a GABAergic neuron, a Glutamatergic neuron, a Cholinergic neuron, a Dopaminergic neuron, a Serotonergic neuron, a glial cell, an astrocyte, a microglial cell, an oligodendrocyte, or a choroid plexus cell.

25. The fusosome of any of claims 1-24, wherein the fusogen is a viral envelope protein.

26. The fusosome of any of claims 1-25, wherein the fusogen comprises VSV-G.

27. The fusosome of any of claims 1-26, wherein the fusogen comprises a sequence chosen from Nipah virus F and G proteins, measles virus F and H proteins, tupaia paramyxovirus F and H proteins, paramyxovirus F and G proteins or F and H proteins or F and HN proteins, Hendra virus F and G proteins, Henipavirus F and G proteins, Morbilivirus F and H proteins, respirovirus F and HN protein, a Sendai virus F and HN protein, rubulavirus F and HN proteins, or avulavirus F and HN proteins, or a derivative thereof, or any combination thereof.

28. The fusosome of any of claims 1-24 and 27, wherein the fusogen comprises a domain of at least 100 amino acids in length having at least 80%, 85%, 90%, 95%, 96%, 97%, 98%, or 99% sequence identity to a wild-type paramyxovirus fusogen, optionally wherein the wild-type paramyxovirus fusogen is set forth in any one of SEQ ID NOS: 1-133.

29. The fusosome of claim 27, wherein the wild-type paramyxovirus is a Nipah virus, optionally wherein the Nipah virus is a henipavirus.

30. The fusosome of any of claims 1-29, wherein the fusogen is re-targeted for delivery to a CNS cell, optionally wherein the CNS cell is a neuron or a glial cell, optionally wherein the CNS cell is a pan-neuronal cell, a GABAergic neuron, a Glutamatergic neuron, a Cholinergic neuron, a Dopaminergic neuron, a Serotonergic neuron, a glial cell, an astrocyte, a microglial cell, an oligodendrocyte, or a choroid plexus cell.

31. The fusosome of any claims 1, 2, 5, 6, 7, and 12-30, wherein the positive target cell-specific regulatory element comprises a CNS cell-specific promoter, a CNS cell-specific enhancer, a CNS cell-specific splice site, a CNS cell-specific site extending half-life of an RNA or protein, a CNS cell-specific mRNA nuclear export promoting site, a CNS cell-specific translational enhancing site, or a CNS cell-specific post-translational modification site.

32. The fusosome of any claims 1, 2, 5, 6, 7 and 12-31 wherein the positive target cell-specific regulatory element comprises a CNS cell-specific promoter.

33. The fusosome of claim 32, wherein the positive CNS cell-specific regulatory element comprises a promoter chosen from a SYN, NSE, CaMKII, aTubulin, PDGF, fSST, fNPY, GAD67, DLX5/6, VGLUT1, Dock10, ChAT, VAChT, Drd1a, TPH-2, GFAP, EAAT1, GS, CX3CR1, TMEM119, MBP, CNP, or CRFR2β promoter.

34. The fusosome of any of claims 2, 4-7, and 13-33, wherein the NTCSRE comprises a non-target cell-specific miRNA recognition sequence, non-target cell-specific protease recognition site, non-target cell-specific ubiquitin ligase site, non-target cell-specific transcriptional repression site, or non-target cell-specific epigenetic repression site.

35. The fusosome of any of claims 2, 4-7, and 13-34, wherein the NTCSRE comprises a tissue-specific miRNA recognition sequence, tissue-specific protease recognition site, tissue-specific ubiquitin ligase site, tissue-specific transcriptional repression site, or tissue-specific epigenetic repression site.

36. The fusosome of any of claims 2, 4-7, and 13-35, wherein the NTCSRE comprises a non-target cell-specific miRNA recognition sequence, non-target cell-specific protease recognition site, non-target cell-specific ubiquitin ligase site, non-target cell-specific transcriptional repression site, or non-target cell-specific epigenetic repression site.

37. The fusosome of any of claims 2, 4-7, and 13-35, wherein the NTCSRE comprises a non-target cell-specific miRNA recognition sequence and the miRNA recognition sequence is able to be bound by one or more of miR-338-3p, miR-9, miR-125b-5p, miR-342-3p, or miR-124; optionally wherein the miRNA is or comprises the sequence set forth in any one of SEQ ID NOS: 156-162.

38. The fusosome of any of claims 34-37, wherein the NTCSRE is situated or encoded within a transcribed region encoding the exogenous agent, optionally wherein an RNA produced by the transcribed region comprises the miRNA recognition sequence within a UTR or coding region.

39. The fusosome of any of claims 1-38, wherein the nucleic acid comprises one or more insulator elements.

40. The fusosome of claim 39, wherein the nucleic acid comprises two insulator elements, optionally wherein the two insulator elements comprise a first insulator element upstream of the payload gene and a second insulator element downstream of the payload gene, optionally wherein the first insulator element and second insulator element comprise the same or different sequences.

41. The fusosome of any of claims 1-40, wherein the fusosome is a retroviral vector particle.

42. The fusosome of any of claims 1-41, wherein the nucleic acid is capable of integrating into the genome of a CNS cell.

43. The fusosome of any of claims 1-42, wherein the target cell is chosen from a CNS cell, optionally wherein the CNS cell is a neuron or a glial cell, optionally wherein the CNS cell is a pan-neuronal cell, a GABAergic neuron, a Glutamatergic neuron, a Cholinergic neuron, a Dopaminergic neuron, a Serotonergic neuron, a glial cell, an astrocyte, a microglial cell, an oligodendrocyte, or a choroid plexus cell.

44. A pharmaceutical composition comprising the fusosome of any of any of claims 1-43, and a pharmaceutically acceptable carrier, diluent, or excipient.

45. A method of delivering an exogenous agent to a subject comprising administering to the subject the fusosome of any of claims 1-43 or the pharmaceutical composition of claim 44, thereby delivering the exogenous agent to the subject.

46. A method of modulating a function, in a subject, CNS tissue, or a CNS cell, comprising contacting the CNS tissue or the CNS cell of the subject with the fusosome of any of claims 1-43 or the pharmaceutical composition of claim 45.

47. The method of claim 46, wherein the CNS cell is neuron or a glial cell, optionally wherein the CNS cell is a pan-neuronal cell, a GABAergic neuron, a Glutamatergic neuron, a Cholinergic neuron, a Dopaminergic neuron, a Serotonergic neuron, a glial cell, an astrocyte, a microglial cell, an oligodendrocyte, or a choroid plexus cell.

48. The method of claim 46 or claim 47, wherein the CNS tissue or the CNS cell is present in a subject.

49. A method of treating a CNS disease or disorder or a lysosomal disease or disorder, comprising administering to the subject the fusosome of any of claims 1-43 or the pharmaceutical composition of claim 44.

50. The method of claim 49, wherein the CNS disease or disorder or the lysosomal disease or disorder is caused by a genetic deficiency.

51. A method of treating a genetic deficiency in a subject comprising administering to the subject the fusosome of any of claims 1-43 or the pharmaceutical composition of claim 44.

52. The method of claim 50 or claim 51, wherein the genetic deficiency is a genetic deficiency able to be treated by the payload gene encoding the exogenous agent.

53. The method of claim 49, claim 50 or claim 52, wherein the disease or disorder is selected from Spinocerebellar Ataxia; Autosomal Recessive, Type 1; Ataxia with Oculomotor Apraxia, Type 2; Fragile X Syndrome; Cerebral Creatine Deficiency Syndrome 1; Angelman Syndrome; Amyotrophic Lateral Sclerosis; Friedreich's Ataxia; Rett Syndrome; Canavan Disease; Pyridoxine-Dependent Epilepsy; Batten Disease, Fucosidosis; Krabbe Disease; Tay Sachs Disease; Sandhoff Disease; Beta-mannosidosis; Metachromatic Leukodystrophy; Mucolipidosis Type Ma; Mucolipidosis Type IIIb; or Mucolipidosis Type IV.

54. The method of any of claims 49-53, wherein the subject is a human subject.

55. A fusosome of any of claims 1-43 or the pharmaceutical composition of claim 44 for use in treating a subject with a CNS disease or disorder or a lysosomal disease or disorder.

56. Use of a fusosome of any of claims 1-43 or the pharmaceutical composition of claim 44 for manufacture of a medicament for use in treating a subject with a CNS disease or disorder or a lysosomal disease or disorder.

57. The fusosome or pharmaceutical composition for use of claim 55 or the use of claim 56, wherein the CNS disease or disorder or a lysosomal disease or disorder is caused by a genetic deficiency.

58. The fusosome or pharmaceutical composition for use of claim 55 or claim 57 or the use of claim 56 or claim 57, wherein the disease or disorder is selected from Spinocerebellar Ataxia; Autosomal Recessive, Type 1; Ataxia with Oculomotor Apraxia, Type 2; Fragile X Syndrome; Cerebral Creatine Deficiency Syndrome 1; Angelman Syndrome; Amyotrophic Lateral Sclerosis; Friedreich's Ataxia; Rett Syndrome; Canavan Disease; Pyridoxine-Dependent Epilepsy; Batten Disease, Fucosidosis; Krabbe Disease; Tay Sachs Disease; Sandhoff Disease; Beta-mannosidosis; Metachromatic Leukodystrophy; Mucolipidosis Type IIIa; Mucolipidosis Type IIIb; or Mucolipidosis Type IV.

59. A fusosome of any of claims 1-43 or the pharmaceutical composition of claim 44 for use in treating a genetic deficiency.

60. Use of a fusosome of any of claims 1-43 or the pharmaceutical composition of claim 44 for manufacture of a medicament for use in treating a genetic deficiency.

61. The fusosome or pharmaceutical composition for use of any of claims 57-59, or the use of claims 57, 58 and 60, wherein the genetic deficiency is a genetic deficiency able to be treated by the payload gene encoding the exogenous agent.

62. A method of making the fusosome of any of claims 1-43, comprising:
a) providing a cell that comprises the nucleic acid and the fusogen;
b) culturing the cell under conditions that allow for production of the fusosome, and
c) separating, enriching, or purifying the fusosome from the cell, thereby making the fusosome.
